(19) United States
(12) Patent Application Publication
(10) Pub. No.: US 2018/0002682 A1
(43) Pub. Date: Jan. 4, 2018

(54) HETERODIMERIC CAS9 AND METHODS OF USE THEREOF

(71) Applicant: The Regents of the University of California, Oakland, CA (US)

(72) Inventors: Samuel H. Sternberg, El Cerrito, CA (US); Jennifer A. Doudna, Berkeley, CA (US); Addison V. Wright, Berkeley, CA (US)

(21) Appl. No.: 15/536,626

(22) PCT Filed: Jan. 7, 2016
(86) PCT No.: PCT/US16/12470

§ 371 Date: Jun. 21, 2017

Related U.S. Application Data
(60) Provisional application No. 62/102,485, filed on Jan. 12, 2015.
(60) Provisional application No. 62/116,263, filed on Feb. 13, 2015.

(51) Int. Cl. C12N 9/22; C12N 15/113

(52) U.S. Cl. CPC C12N 9/22; C12N 15/113; C07K 2319/09; C07K 2319/70; C12N 2310/10

(57) ABSTRACT

The present disclosure provides a Cas9 heterodimer, as well as nucleic acids encoding the Cas9 heterodimer, and host cells comprising the nucleic acids. The present disclosure provides a system that includes a Cas9 heterodimer of the present disclosure and at least one of: a Cas9 guide RNA, and a dimerizing agent. A Cas9 heterodimer of the present disclosure is useful in a wide variety of applications, which are also provided.

### CROSS-REFERENCE

[0001] This application claims the benefit of U.S. Provisional Patent Application No. 62/102,485, filed Jan. 12, 2015, and of U.S. Provisional Patent Application No. 62/116,263, filed Feb. 13, 2015, which applications are incorporated herein by reference in their entirety.

### INCORPORATION BY REFERENCE OF SEQUENCE LISTING PROVIDED AS A TEXT FILE

[0002] A Sequence Listing is provided herewith as a text file, “BERK-267PRV2-SeqList_ST25.txt” created on Feb. 11, 2015 and having a size of 7,769 KB. The contents of the text file are incorporated by reference herein in their entirety.

### SUMMARY

[0003] The present disclosure provides a Cas9 heterodimer, as well as nucleic acids encoding the Cas9 heterodimer, and host cells comprising the nucleic acids. The present disclosure provides a system that includes a Cas9 heterodimer of the present disclosure and at least one of: a Cas9 guide RNA, and a dimerizing agent. A Cas9 heterodimer of the present disclosure is useful in a wide variety of applications, which are also provided.

[0004] The present disclosure provides a Cas9 heterodimer comprising: A) a first fusion polypeptide comprising: a) a first polypeptide comprising: i) a RuvCI polypeptide; ii) a RuvCII polypeptide; iii) an HNH polypeptide; iv) a RuvCIII polypeptide; and v) a PAM-interacting polypeptide; and b) a first fusion partner, where the first fusion partner is a first member of a dimerization pair; and B) a second fusion polypeptide comprising: a) an alpha-helical recognition region; and b) a second fusion partner, where the second fusion partner is a second member of a dimerization pair. In some cases, the RuvCI polypeptide comprises an amino acid sequence having at least 75% amino acid sequence, at least 80%, at least 85%, at least 90%, at least 95%, at least 98%, at least 99%, or 100%, amino acid sequence identity to amino acids 1-60 of the Streptococcus pyogenes Cas9 amino acid sequence set forth in SEQ ID NO: 1545 or a corresponding Cas9 amino acid sequence set forth in any of SEQ ID NOs: 1-259 and 795-1346, and has a length of from about 50 amino acids to about 70 amino acids. In some cases, the RuvCII polypeptide comprises an amino acid sequence having at least 75% amino acid sequence, at least 80%, at least 85%, at least 90%, at least 95%, at least 98%, at least 99%, or 100%, amino acid sequence identity to amino acids 719-775 of the Streptococcus pyogenes Cas9 amino acid sequence set forth in SEQ ID NO: 1545 or a corresponding Cas9 amino acid sequence set forth in any of SEQ ID NOs: 1-259 and 795-1346, and has a length of from about 40 amino acids to about 70 amino acids. In some cases, the HNH polypeptide comprises an amino acid sequence having at least 75% amino acid sequence, at least 80%, at least 85%, at least 90%, at least 95%, at least 98%, at least 99%, or 100%, amino acid sequence identity to amino acids 776 to 909 of the Streptococcus pyogenes Cas9 amino acid sequence set forth in SEQ ID NO: 1545 or a corresponding Cas9 amino acid sequence set forth in any of SEQ ID NOs: 1-259 and 795-1346, and has a length of from about 120 amino acids to about 145 amino acids. In some cases, the RuvCIII polypeptide comprises an amino acid sequence having at least at least 75% amino acid sequence, at least 80%, at least 85%, at least 90%, at least 95%, at least 98%, at least 99%, or 100%, amino acid sequence identity to amino acids 910-1099 of the Streptococcus pyogenes Cas9 amino acid sequence set forth in SEQ ID NO: 1545 or a corresponding Cas9 amino acid sequence set forth in any of SEQ ID NOs: 1-259 and 795-1346, and has a length of from about 170 amino acids to about 210 amino acids. In some cases, the PAM-interacting polypeptide comprises an amino acid sequence having at least 75% amino acid sequence, at least 80%, at least 85%, at least 90%, at least 95%, at least 98%, at least 99%, or 100%, amino acid sequence identity to amino acids 1100-1367 of the Streptococcus pyogenes Cas9 amino acid sequence set forth in SEQ ID NO: 1545 or a corresponding Cas9 amino acid sequence set forth in any of SEQ ID NOs: 1-259 and 795-1346, and has a length of from about 250 amino acids to about 280 amino acids. In some cases, the first fusion polypeptide comprises one or more heterologous nuclear localization sequences (NLS) that provides for nuclear localization. In some cases, the NLS is at or near the N-terminus of the first fusion polypeptide. In some cases, the NLS is at or near the C-terminus of the first fusion polypeptide. In some cases, the first fusion polypeptide comprises an NLS at or near the N-terminus of the first fusion polypeptide and comprises an NLS at or near the C-terminus of the first fusion polypeptide. In some cases, wherein the second fusion polypeptide comprises one or more heterologous nuclear localization sequences (NLS) that provides for nuclear localization. In some cases, the NLS is at or near the N-terminus of the second fusion polypeptide. In some cases, the NLS is at or near the C-terminus of the second fusion polypeptide. In some cases, the second fusion polypeptide comprises an NLS at or near the N-terminus of the first second polypeptide and comprises an NLS at or near the C-terminus of the second fusion polypeptide. In some cases, wherein the first fusion partner is or near the N-terminus of the first polypeptide. In some cases, the first fusion partner is or near the C-terminus of the first polypeptide. In some cases, the first fusion partner is located internally to the first polypeptide. In some cases, the first fusion partner is located within the HNH polypeptide. In some cases, the first fusion partner is located between amino acids 860 and 880 of the 776 to 909 of the Streptococcus pyogenes Cas9 amino acid sequence set forth in SEQ ID NO: 1545 or a corresponding Cas9 amino acid sequence set forth in any of SEQ ID NOs: 1-259 and 795-1346. In some cases, the first fusion partner is located within the RuvCIII polypeptide. In some cases, the first fusion partner is located between amino acids 1000 and 1025 of the Streptococcus pyogenes Cas9 amino acid sequence set forth in SEQ ID NO: 1545 or a corresponding Cas9 amino acid sequence set forth in any of SEQ ID NOs: 1-259 and 795-1346. In some cases, the second fusion partner is or near the N-terminus of the second polypeptide. In some cases, the second fusion partner is or near the C-terminus of the second polypeptide. In some cases, the second fusion partner is located internally to the second polypeptide.

[0005] The present disclosure provides a Cas9 heterodimer comprising: A) a first fusion polypeptide comprising: a) a first, circular permuted, polypeptide that comprises: i) a RuvCI polypeptide; ii) a RuvCII polypeptide; iii) an HNH polypeptide; iv) a RuvCIII polypeptide; and v) a PAM-interacting polypeptide; and b) a first fusion partner, where the first fusion partner is a first member of a dimerization pair; and B) a second fusion polypeptide comprising: a) a second polypeptide that comprises an alpha-helical recognition region; and b) a second fusion partner, where the second fusion partner is a second member of the dimerization pair. In some cases, the first, circular permuted, polypeptide comprises, in order from N-terminus to C-terminus: i) a RuvCII polypeptide; ii) an HNH polypeptide; iii) a RuvCIII polypeptide; iv) a PAM-interacting polypeptide; and v) a RuvCI polypeptide. In some cases, the first, circular permuted, polypeptide comprises, in order from N-terminus to C-terminus: i) an HNH polypeptide; ii) a RuvCIII polypeptide; iii) a PAM-interacting polypeptide; iv) a RuvCI polypeptide; and v) a RuvCII polypeptide. In some cases, the first, circular permuted, polypeptide comprises, in order from N-terminus to C-terminus: i) a RuvCIII polypeptide; ii) a PAM-interacting polypeptide; iii) a RuvCI polypeptide; iv) a RuvCII polypeptide; and v) an HNH polypeptide. In some cases, the first, circular permuted, polypeptide comprises, in order from N-terminus to C-terminus: i) a C-terminal portion of a RuvCIII polypeptide; ii) a PAM-interacting polypeptide; iii) a RuvCI polypeptide; iv) a RuvCII polypeptide; v) an HNH polypeptide; and vi) an N-terminal portion of a RuvCIII polypeptide. In some cases, the first, circular permuted, polypeptide comprises, in order from N-terminus to C-terminus: i) a C-terminal portion of an HNH polypeptide; ii) a RuvCIII polypeptide; iii) a PAM-interacting polypeptide; iv) a RuvCI polypeptide; v) a RuvCII polypeptide; and v) an N-terminal portion of an HNH polypeptide. In some cases, the first fusion polypeptide comprises, in order from N-terminus to C-terminus: a) the first fusion partner; and b) the first polypeptide. In some cases, the first fusion polypeptide comprises, in order from N-terminus to C-terminus: a) the first polypeptide; and b) the first fusion partner. In some cases, the first fusion polypeptide comprises, in order from N-terminus to C-terminus: a) heterologous nuclear localization sequences (NLS) that provides for nuclear localization; b) the first fusion partner; and c) the first polypeptide. In some cases, the first fusion polypeptide comprises, in order from N-terminus to C-terminus: a) an NLS; b) the first fusion partner; c) the first polypeptide; and d) an NLS. In some cases, the first fusion polypeptide and the second fusion polypeptide form a heterodimer in the presence of a small molecule dimerizer. In any of the embodiments set forth above or herein, in some cases, a) the first fusion partner is (FK506 binding protein 1A) FKBP1A; and the second fusion partner is FKBP1A; b) the first fusion partner is FKBP1A; and the second fusion partner is and PPP3CA (protein phosphatase 3, catalytic subunit, alpha isozyme); c) the first fusion partner is FKBP1A; and the second fusion partner is and cyclophilin; d) the first fusion partner is FKBP1A; and the second fusion partner is and Fkbp-Rapamycin Binding Domain (FRB); e) the first fusion partner is gyrase B (GyrB); and the second fusion partner is and GyrB; f) the first fusion partner is dihydrofolate reductase (DHFR); and the second fusion partner is and DHFR; g) the first fusion partner is DmrB; and the second fusion partner is and DmrB; h) the first fusion partner is PYL; and the second fusion partner is and ABI; i) the first fusion partner is Cry2; and the second fusion partner is and CIP; or j) the first fusion partner is GAI; and the second fusion partner is and GID1. In some cases, a) the second fusion partner is (FK506 binding protein 1A) FKBP1A; and the first fusion partner is FKBP1A; b) the second fusion partner is FKBP1A; and the first fusion partner is and PPP3CA (protein phosphatase 3, catalytic subunit, alpha isozyme); c) the second fusion partner is FKBP1A; and the first fusion partner is and cyclophilin; d) the second fusion partner is FKBP1A; and the first fusion partner is and Fkbp-Rapamycin Binding Domain (FRB); e) the second fusion partner is gyrase B (GyrB); and the first fusion partner is and GyrB; f) the second fusion partner is dihydrofolate reductase (DHFR); and the first fusion partner is and DHFR; g) the second fusion partner is DmrB; and the first fusion partner is and DmrB; h) the second fusion partner is PYL; and the first fusion partner is and ABI; i) the second fusion partner is Cry2; and the first fusion partner is and CIP; or j) the second fusion partner is GAI; and the first fusion partner is and GID1.

[0006] The present disclosure provides a system comprising: a Cas9 heterodimer (e.g., as described above) and a Cas9 guide RNA that comprises stem loop 1 but does not comprise at least one of: a stem loop 2 and a stem loop 3. In some cases, the Cas9 guide RNA does not comprise a stem loop 2 and does not comprise a stem loop 3. In some cases, the system comprises a small molecule dimerizer that induces dimerization of the first fusion polypeptide and the second fusion polypeptide.

[0007] The present disclosure provides one or more nucleic acids comprising nucleotide sequences encoding the Cas9 heterodimer (e.g., as described above). In some cases, the nucleotide sequences encoding the first fusion polypeptide and the nucleotide sequences encoding the second fusion polypeptide are in the same nucleic acid. In some cases, the nucleotide sequences encoding the first fusion polypeptide and nucleotide sequences encoding the second fusion polypeptide are in separate nucleic acids. In some cases, the nucleotide sequences encoding the first fusion polypeptide are operably linked to a transcription control sequence. In some cases, the nucleotide sequences encoding the second fusion polypeptide are operably linked to a transcription control sequence. The present disclosure provides a recombinant vector comprising the one or more nucleic acids. In some cases, the vector is a viral vector. In some cases, the viral vector is an adeno-associated viral vector, a lentiviral vector, or a retroviral vector. The present disclosure provides a host cell genetically modified with the one or more nucleic acids or with the recombinant expression vector. In some cases, the host cell is a prokaryotic cell. In some cases, the host cell is a eukaryotic cell. In some cases, the host cell is a mammalian cell, a plant cell, an amphibian cell, a reptile cell, a yeast cell, a protozoan cell, or a helminth cell.

[0008] The present disclosure provides a method of binding a target nucleic acid, comprising: contacting a target nucleic acid with the system described above (e.g., comprising a Cas9 heterodimer and a Cas9 guide RNA, e.g., a truncated Cas9 guide RNA that does not include stem loops 2 or 3). In some cases, the method results in modification of the target nucleic acid. In some cases, the modification is cleavage. In some cases, the Cas9 guide RNA does not comprise a stem loop 2 and does not comprise a stem loop 3. In some cases, the system comprises a small molecule dimerizer that induces dimerization of the first fusion polypeptide and the second fusion polypeptide. In some cases, the system comprises a donor polynucleotide. In some cases, the system comprises a PAMmer. In some cases, the Cas9 heterodimer has reduced nuclease activity. In some cases, the Cas9 heterodimer has nickase activity. In some cases, the Cas9 heterodimer includes a fusion partner that provides for an activity selected from: transcription modulation, methyltransferase activity, demethylase activity, acetyltransferase activity, deacetylase activity, kinase activity, phosphatase activity, ubiquitin ligase activity, deubiquitinating activity, adenylation activity, deadenylation activity, SUMOylating activity, deSUMOylating activity, ribosylation activity, deribosylation activity, myristoylation activity, and demyristoylation activity.

### BRIEF DESCRIPTION OF THE DRAWINGS

[0009] FIGS. 1A-B present one embodiment of a split Cas9 protein (a Cas9 heterodimer), and a crystal structure that illustrates where the nuclease lobe and alpha-helical lobe can be separated relative to a wild type Cas9 protein.

[0010] FIG. 2 presents assays related to the expression and cleavage activity of split Cas9.

[0011] FIG. 3 presents assays related to DNA cleavage activity of split Cas9 when using truncated single guide RNA (sgRNA).

[0012] FIGS. 4A-B present two different suitable dimerization domain insertion sites (and/or circular permutation sites) for split Cas9.

[0013] FIG. 5 depicts a Cas9 protein sequence of S. pyogenes (SEQ ID NO: 1545).

[0014] FIGS. 6A and 6B present illustrative example sequences of nuclease lobes and alpha-helical lobes (first and second polypeptides) of a subject Split Cas9. The examples depicted include tags (e.g., his tag, maltose binding protein (MBP)), protease sites (e.g., TEV protease sites), and the like.

[0015] FIG. 7 presents illustrative example sequences of nuclease lobes and alpha-helical lobes (first and second polypeptides) of a subject Split Cas9. The examples depicted include fusion partners (including dimer pair members), linkers, NLSs, tags (e.g., FLAG tags, HA tags), etc.

[0016] FIGS. 8A-F provide a schematic drawing of exemplary embodiments of subject compositions and methods in which the target nucleic acid is a single stranded nucleic acid. (A-B) Each embodiment depicted includes a PAMmer, which is hybridized to a single stranded target nucleic acid; and a guide nucleic acid (Cas9 guide RNA), which is hybridized to the target nucleic acid and is associated with a Cas9 heterodimer. In cases where the target nucleic acid is double stranded, the PAM sequence can be provided by the target nucleic acid and a PAMmer may therefore not be necessary. (C-D) Each embodiment depicted in C and D includes a PAMmer having a specificity segment and an orientation segment. The PAM sequence is complementary to the target nucleic acid in 12C, and is not complementary to the target nucleic acid in 12D. (E-F) Each embodiment depicted in E and F includes a PAMmer having either a specificity segment or an orientation segment. The PAM sequence is complementary to the target nucleic acid on the right, and is not complementary to the target nucleic acid on the left.

[0017] FIG. 9 presents a schematic of one possible guide RNA. The depicted guide RNA is a single guide RNA with a targeter covalently linked to an activator via 4 linker nucleotides. The nucleotides are 5′ to 3′ from left to right.

[0018] FIGS. 10A-D present a schematic of one way in which Cas9 can be split into two separate polypeptides that retain the ability to catalyze RNA-guided dsDNA cleavage.

[0019] FIGS. 11A-E present data related to the requirements for split-Cas9 assembly.

[0020] FIGS. 12A-C present genomic editing data for split-Cas9.

[0021] FIGS. 13A-B present size exclusion chromatograms of purified α-helical (top) and nuclease (bottom) lobes.

[0022] FIGS. 14A-C present split-Cas9 activity data and individual lobe data related to the use single-guide and dual-guide RNAs.

[0023] FIGS. 15A-B present split-Cas9 versus non-split Cas9 binding affinity data for target DNA.

[0024] FIGS. 16A-D present data related to requirements for split-Cas9 heterodimerization.

[0025] FIG. 17 presents data related to the DNA cleavage activity of split-Cas9 in the presence of excess sgRNA.

[0026] FIGS. 18A-C present a schematic of one strategy for inducible control of genome engineering by a split-Cas9 enzyme complex.

[0027] FIGS. 19A-B present data related to split-Cas9 activity in the presence of different sgRNAs.

[0028] FIGS. 20A-B present Table 1 and Table S1 of Example 2.

### DEFINITIONS

[0029] The terms “polynucleotide” and “nucleic acid,” used interchangeably herein, refer to a polymeric form of nucleotides of any length, either ribonucleotides or deoxynucleotides. Thus, this term includes, but is not limited to, single-, double-, or multi-stranded DNA or RNA, genomic DNA, cDNA, DNA-RNA hybrids, or a polymer comprising purine and pyrimidine bases or other natural, chemically or biochemically modified, non-natural, or derivatized nucleotide bases. The terms “polynucleotide” and “nucleic acid” should be understood to include, as applicable to the embodiment being described, single-stranded (such as sense or antisense) and double-stranded polynucleotides.

[0030] The term “naturally-occurring” as used herein as applied to a nucleic acid, a cell, or an organism, refers to a nucleic acid, cell, or organism that is found in nature. For example, a polypeptide or polynucleotide sequence that is present in an organism (including viruses) that can be isolated from a source in nature and which has not been intentionally modified by a human in the laboratory is naturally occurring.

[0031] As used herein the term “isolated” is meant to describe a polynucleotide, a polypeptide, or a cell that is in an environment different from that in which the polynucleotide, the polypeptide, or the cell naturally occurs. An isolated genetically modified host cell may be present in a mixed population of genetically modified host cells.

[0032] “Heterologous,” as used herein, means a nucleotide or polypeptide sequence that is not found in the native nucleic acid or protein, respectively. For example, a first fusion polypeptide of a Cas9 heterodimer can comprise a polypeptide comprising a Cas9 nuclease and a non-Cas9 polypeptide, where the non-Cas9 polypeptide can be a fusion partner, etc.

[0033] As used herein, the term “exogenous nucleic acid” refers to a nucleic acid that is not normally or naturally found in and/or produced by a given bacterium, organism, or cell in nature. As used herein, the term “endogenous nucleic acid” refers to a nucleic acid that is normally found in and/or produced by a given bacterium, organism, or cell in nature. An “endogenous nucleic acid” is also referred to as a “native nucleic acid” or a nucleic acid that is “native” to a given bacterium, organism, or cell.

[0034] “Recombinant,” as used herein, means that a particular nucleic acid (DNA or RNA) is the product of various combinations of cloning, restriction, and/or ligation steps resulting in a construct having a structural coding or non-coding sequence distinguishable from endogenous nucleic acids found in natural systems. Generally, DNA sequences encoding the structural coding sequence can be assembled from cDNA fragments and short oligonucleotide linkers, or from a series of synthetic oligonucleotides, to provide a synthetic nucleic acid which is capable of being expressed from a recombinant transcriptional unit contained in a cell or in a cell-free transcription and translation system. Such sequences can be provided in the form of an open reading frame uninterrupted by internal non-translated sequences, or introns, which are typically present in eukaryotic genes. Genomic DNA comprising the relevant sequences can also be used in the formation of a recombinant gene or transcriptional unit. Sequences of non-translated DNA may be present 5′ or 3′ from the open reading frame, where such sequences do not interfere with manipulation or expression of the coding regions, and may indeed act to modulate production of a desired product by various mechanisms (see “DNA regulatory sequences”, below).

[0035] Thus, e.g., the term “recombinant” polynucleotide or “recombinant” nucleic acid refers to one which is not naturally occurring, e.g., is made by the artificial combination of two otherwise separated segments of sequence through human intervention. This artificial combination is often accomplished by either chemical synthesis means, or by the artificial manipulation of isolated segments of nucleic acids, e.g., by genetic engineering techniques. Such is usually done to replace a codon with a redundant codon encoding the same or a conservative amino acid, while typically introducing or removing a sequence recognition site. Alternatively, it is performed to join together nucleic acid segments of desired functions to generate a desired combination of functions. This artificial combination is often accomplished by either chemical synthesis means, or by the artificial manipulation of isolated segments of nucleic acids, e.g., by genetic engineering techniques.

[0036] Similarly, the term “recombinant” polypeptide refers to a polypeptide which is not naturally occurring, e.g., is made by the artificial combination of two otherwise separated segments of amino sequence through human intervention. Thus, e.g., a polypeptide that comprises a heterologous amino acid sequence is recombinant.

[0037] By “construct” or “vector” is meant a recombinant nucleic acid, generally recombinant DNA, which has been generated for the purpose of the expression and/or propagation of a specific nucleotide sequence(s), or is to be used in the construction of other recombinant nucleotide sequences.

[0038] The terms “DNA regulatory sequences,” “control elements,” and “regulatory elements,” used interchangeably herein, refer to transcriptional and translational control sequences, such as promoters, enhancers, polyadenylation signals, terminators, protein degradation signals, and the like, that provide for and/or regulate expression of a coding sequence and/or production of an encoded polypeptide in a host cell.

[0039] The term “transformation” is used interchangeably herein with “genetic modification” and refers to a permanent or transient genetic change induced in a cell following introduction of new nucleic acid (i.e., DNA exogenous to the cell). Genetic change (“modification”) can be accomplished either by incorporation of the new DNA into the genome of the host cell, or by transient or stable maintenance of the new DNA as an episomal element. Where the cell is a eukaryotic cell, a permanent genetic change is generally achieved by introduction of the DNA into the genome of the cell. In prokaryotic cells, permanent changes can be introduced into the chromosome or via extrachromosomal elements such as plasmids and expression vectors, which may contain one or more selectable markers to aid in their maintenance in the recombinant host cell. Suitable methods of genetic modification include viral infection, transfection, conjugation, protoplast fusion, electroporation, particle gun technology, calcium phosphate precipitation, direct microinjection, and the like. The choice of method is generally dependent on the type of cell being transformed and the circumstances under which the transformation is taking place (i.e. in vitro, ex vivo, or in vivo). A general discussion of these methods can be found in Ausubel, et al, Short Protocols in Molecular Biology, 3rd ed., Wiley & Sons, 1995.

[0040] “Operably linked” refers to a juxtaposition wherein the components so described are in a relationship permitting them to function in their intended manner For instance, a promoter is operably linked to a coding sequence if the promoter affects its transcription or expression. As used herein, the terms “heterologous promoter” and “heterologous control regions” refer to promoters and other control regions that are not normally associated with a particular nucleic acid in nature. For example, a “transcriptional control region heterologous to a coding region” is a transcriptional control region that is not normally associated with the coding region in nature.

[0041] A “host cell,” as used herein, denotes an in vivo or in vitro eukaryotic cell, a prokaryotic cell, or a cell from a multicellular organism (e.g., a cell line) cultured as a unicellular entity, which eukaryotic or prokaryotic cells can be, or have been, used as recipients for a nucleic acid (e.g., an expression vector that comprises a nucleotide sequence encoding one or more biosynthetic pathway gene products such as mevalonate pathway gene products), and include the progeny of the original cell which has been genetically modified by the nucleic acid. It is understood that the progeny of a single cell may not necessarily be completely identical in morphology or in genomic or total DNA complement as the original parent, due to natural, accidental, or deliberate mutation. A “recombinant host cell” (also referred to as a “genetically modified host cell”) is a host cell into which has been introduced a heterologous nucleic acid, e.g., an expression vector. For example, a subject prokaryotic host cell is a genetically modified prokaryotic host cell (e.g., a bacterium), by virtue of introduction into a suitable prokaryotic host cell of a heterologous nucleic acid, e.g., an exogenous nucleic acid that is foreign to (not normally found in nature in) the prokaryotic host cell, or a recombinant nucleic acid that is not normally found in the prokaryotic host cell; and a subject eukaryotic host cell is a genetically modified eukaryotic host cell, by virtue of introduction into a suitable eukaryotic host cell of a heterologous nucleic acid, e.g., an exogenous nucleic acid that is foreign to the eukaryotic host cell, or a recombinant nucleic acid that is not normally found in the eukaryotic host cell.

[0042] The term “conservative amino acid substitution” refers to the interchangeability in proteins of amino acid residues having similar side chains. For example, a group of amino acids having aliphatic side chains consists of glycine, alanine, valine, leucine, and isoleucine; a group of amino acids having aliphatic-hydroxyl side chains consists of serine and threonine; a group of amino acids having amide-containing side chains consists of asparagine and glutamine; a group of amino acids having aromatic side chains consists of phenylalanine, tyrosine, and tryptophan; a group of amino acids having basic side chains consists of lysine, arginine, and histidine; and a group of amino acids having sulfur-containing side chains consists of cysteine and methionine. Exemplary conservative amino acid substitution groups are: valine-leucine-isoleucine, phenylalanine-tyrosine, lysine-arginine, alanine-valine, and asparagine-glutamine.

[0043] A polynucleotide or polypeptide has a certain percent “sequence identity” to another polynucleotide or polypeptide, meaning that, when aligned, that percentage of bases or amino acids are the same, and in the same relative position, when comparing the two sequences. Sequence similarity can be determined in a number of different manners. To determine sequence identity, sequences can be aligned using the methods and computer programs, including BLAST, available over the world wide web at ncbi.nlm.nih.gov/BLAST. See, e.g., Altschul et al. (1990), J. Mol. Biol. 215:403-10. Another alignment algorithm is FASTA, available in the Genetics Computing Group (GCG) package, from Madison, Wis., USA, a wholly owned subsidiary of Oxford Molecular Group, Inc. Other techniques for alignment are described in Methods in Enzymology, vol. 266: Computer Methods for Macromolecular Sequence Analysis (1996), ed. Doolittle, Academic Press, Inc., a division of Harcourt Brace & Co., San Diego, Calif., USA. Of particular interest are alignment programs that permit gaps in the sequence. The Smith-Waterman is one type of algorithm that permits gaps in sequence alignments. See Meth. Mol. Biol. 70: 173-187 (1997). Also, the GAP program using the Needleman and Wunsch alignment method can be utilized to align sequences. See J. Mol. Biol. 48: 443-453 (1970).

[0044] Before the present invention is further described, it is to be understood that this invention is not limited to particular embodiments described, as such may, of course, vary. It is also to be understood that the terminology used herein is for the purpose of describing particular embodiments only, and is not intended to be limiting, since the scope of the present invention will be limited only by the appended claims.

[0045] Where a range of values is provided, it is understood that each intervening value, to the tenth of the unit of the lower limit unless the context clearly dictates otherwise, between the upper and lower limit of that range and any other stated or intervening value in that stated range, is encompassed within the invention. The upper and lower limits of these smaller ranges may independently be included in the smaller ranges, and are also encompassed within the invention, subject to any specifically excluded limit in the stated range. Where the stated range includes one or both of the limits, ranges excluding either or both of those included limits are also included in the invention.

[0046] Unless defined otherwise, all technical and scientific terms used herein have the same meaning as commonly understood by one of ordinary skill in the art to which this invention belongs. Although any methods and materials similar or equivalent to those described herein can also be used in the practice or testing of the present invention, the preferred methods and materials are now described. All publications mentioned herein are incorporated herein by reference to disclose and describe the methods and/or materials in connection with which the publications are cited.

[0047] It must be noted that as used herein and in the appended claims, the singular forms “a,” “an,” and “the” include plural referents unless the context clearly dictates otherwise. Thus, for example, reference to “a Cas9 polypeptide” includes a plurality of such polypeptides and reference to “the guide RNA” includes reference to one or more guide RNAs and equivalents thereof known to those skilled in the art, and so forth. It is further noted that the claims may be drafted to exclude any optional element. As such, this statement is intended to serve as antecedent basis for use of such exclusive terminology as “solely,” “only” and the like in connection with the recitation of claim elements, or use of a “negative” limitation.

[0048] It is appreciated that certain features of the invention, which are, for clarity, described in the context of separate embodiments, may also be provided in combination in a single embodiment. Conversely, various features of the invention, which are, for brevity, described in the context of a single embodiment, may also be provided separately or in any suitable sub-combination. All combinations of the embodiments pertaining to the invention are specifically embraced by the present invention and are disclosed herein just as if each and every combination was individually and explicitly disclosed. In addition, all sub-combinations of the various embodiments and elements thereof are also specifically embraced by the present invention and are disclosed herein just as if each and every such sub-combination was individually and explicitly disclosed herein.

[0049] The publications discussed herein are provided solely for their disclosure prior to the filing date of the present application. Nothing herein is to be construed as an admission that the present invention is not entitled to antedate such publication by virtue of prior invention. Further, the dates of publication provided may be different from the actual publication dates which may need to be independently confirmed.

### DETAILED DESCRIPTION

[0050] The present disclosure provides a Cas9 heterodimer, as well as nucleic acids encoding the Cas8 heterodimer, and host cells comprising the nucleic acids. The present disclosure provides a system comprising a Cas9 heterodimer of the present disclosure. A Cas9 heterodimer of the present disclosure is useful in a wide variety of applications, which are also provided.

[0051] CAS9 Heterodimers

[0052] The present disclosure provides a Cas9 heterodimer. A Cas9 heterodimer of the present disclosure comprises two polypeptides, where the two polypeptides are not covalently linked to one another. A Cas9 heterodimer of the present disclosure is also referred to herein as a “heterodimeric Cas9 complex” and/or or a “split Cas9 protein” and/or or a “heterodimeric Cas9 protein.” A Cas9 heterodimer of the present disclosure includes a first fusion polypeptide comprising a first polypeptide (e.g., a Cas9 nuclease lobe) covalently linked (directly or via a linker) to a first fusion partner; and a second fusion polypeptide comprising a second polypeptide (e.g., a Cas9 alpha-helical lobe) covalently linked (directly or via a linker) to a second fusion partner. In some cases, the first polypeptide (e.g., a Cas9 nuclease lobe) is circularly permuted (i.e., in some cases, the first polypeptide is a circular permutant).

[0053] A Cas9 heterodimer of the present disclosure comprises two polypeptides that can interact to form a complex (i.e., to form the heterodimeric Cas9 protein). A Cas9 heterodimer of the present disclosure is also referred to herein as a “split Cas9” or a “split Cas9 protein.” The fusion partners present in the first fusion polypeptide and the second fusion polypeptide can be induced to dimerize (e.g., by a dimerizing agent). When the fusion partners present in the first fusion polypeptide and the second fusion polypeptide dimerize, the first fusion polypeptide and the second fusion polypeptide dimerize. In the absence of a dimerizing agent, and in the absence of a guide RNA that includes a stem loop 2 and/or a stem loop 3, the first fusion polypeptide and the second fusion polypeptide do not dimerize. When the first fusion polypeptide and the second fusion polypeptide dimerize, the Cas9 heterodimer, together with a truncated guide RNA (e.g., a guide RNA that does not include stem loop 2 and/or stem loop 3), can bind a target nucleic acid (an in some cases modify, e.g., cleave or otherwise modify the target nucleic acid). A Cas9 heterodimer of the present disclosure and a truncated guide RNA form a “Cas9 heterodimer system,” described herein. A Cas9 heterodimer system of the present disclosure can bind to a target nucleic acid. In some cases, a Cas9 heterodimer system of the present disclosure can bind to a target nucleic acid and cleave the target nucleic acid. In some cases, a Cas9 heterodimer system of the present disclosure can bind to a target nucleic acid and modify the target nucleic acid. In some cases, a Cas9 heterodimer system of the present disclosure can bind to a target nucleic acid and modulate transcription of/from the target nucleic acid.

[0054] A subject Cas9 heterodimer (a split Cas9 protein) includes a first polypeptide (where the first polypeptide includes a Cas9 nuclease lobe) and a second polypeptide (where the second polypeptide includes a Cas9 alpha-helical lobe) (e.g., see FIG. 1). A nuclease lobe includes: (i) a RuvC domain, where a RuvC domain comprises a RuvCI polypeptide, a RuvCII polypeptide, and a RuvCIII polypeptide; (ii) an HNH domain (also referred to as an HNH polypeptide); and (iii) a PAM-interacting domain (also referred to as a “PAM-interacting polypeptide”). A Cas9 alpha-helical lobe is also referred to as an “alpha-helical recognition region.”

Cas9 Heterodimers with Nuclease Lobe and Alpha-Helical Lobe

[0055] In some cases, a Cas9 heterodimer of the present disclosure comprises: A) a first fusion polypeptide comprising: a) a first polypeptide comprising: i) a RuvCI polypeptide; ii) a RuvCII polypeptide; iii) an HNH polypeptide; iv) a RuvCIII polypeptide; and v) a PAM-interacting polypeptide; and b) a first fusion partner, where the first fusion partner is a first member of a dimerization pair; and B) a second fusion polypeptide comprising: a) an alpha-helical recognition region; and b) a second fusion partner, where the second fusion partner is a second member of a dimerization pair.

### First Fusion Polypeptide

[0056] As noted above, in some cases, a Cas9 heterodimer of the present disclosure comprises : A) a first fusion polypeptide comprising: a) a first polypeptide comprising: i) a RuvCI polypeptide; ii) a RuvCII polypeptide; iii) an HNH polypeptide; iv) a RuvCIII polypeptide; and v) a PAM-interacting polypeptide; and b) a first fusion partner, where the first fusion partner is a first member of a dimerization pair; and B) a second fusion polypeptide comprising: a) an alpha-helical recognition region; and b) a second fusion partner, where the second fusion partner is a second member of a dimerization pair.

[0057] A RuvCI polypeptide can comprise an amino acid sequence having at least 75%, at least 80%, at least 85%, at least 90%, at least 95%, at least 98%, at least 99%, or 100%, amino acid sequence identity to a contiguous stretch of from 40 amino acids to 60 amino acids of amino acids 1-60 of the S. pyogenes Cas9 amino acid sequence set forth in SEQ ID NO: 1545, or a corresponding segment of a Cas9 polypeptide amino acid sequence set forth in any of SEQ ID NOs: 1-259 and 795-1346; and can have a length of from 40 amino acids to 80 amino acids, e.g., from 40 amino acids to 50 amino acids, from 50 amino acids to 60 amino acids, from 60 amino acids to 70 amino acids, or from 70 amino acids to 80 amino acids. In some cases, a RuvCI polypeptide comprises an amino acid sequence having at least 75%, at least 80%, at least 85%, at least 90%, at least 95%, at least 98%, at least 99%, or 100%, amino acid sequence identity to amino acids 1-60 of the S. pyogenes Cas9 amino acid sequence set forth in SEQ ID NO: 1545, or a corresponding segment of a Cas9 polypeptide amino acid sequence set forth in any of SEQ ID NOs: 1-259 and 795-1346; and has a length of from 50 amino acids to 60 amino acids (e.g., 50, 51, 52, 53, 54, 55, 56, 57, 58, 59, or 60 amino acids). For example, in some cases, a RuvCI polypeptide can have at least 75%, at least 80%, at least 85%, at least 90%, at least 95%, at least 98%, at least 99%, or 100%, amino acid sequence identity to amino acids 2-56 of the S. pyogenes Cas9 amino acid sequence set forth in SEQ ID NO: 1545, or a corresponding segment of a Cas9 polypeptide amino acid sequence set forth in any of SEQ ID NOs: 1-259 and 795-1346.

[0058] A RuvCII polypeptide can comprise an amino acid sequence having at least 75%, at least 80%, at least 85%, at least 90%, at least 95%, at least 98%, at least 99%, or 100%, amino acid sequence identity to a contiguous stretch of from 40 to 57 amino acids of amino acids 718-774 of the S. pyogenes Cas9 amino acid sequence set forth in SEQ ID NO: 1545, or a corresponding segment of a Cas9 polypeptide amino acid sequence set forth in any of SEQ ID NOs: 1-259 and 795-1346; and can have a length of from 40 amino acids to about 70 amino acids, e.g., from 40 amino acids to 45 amino acids, from 45 amino acids to 50 amino acids, from 50 amino acids to 55 amino acids, from 55 amino acids to 60 amino acids, from 60 amino acids to 65 amino acids, or from 65 amino acids to 70 amino acids. In some cases, a RuvCII polypeptide comprises an amino acid sequence having at least 75%, at least 80%, at least 85%, at least 90%, at least 95%, at least 98%, at least 99%, or 100%, amino acid sequence identity to amino acids 718-774 of the S. pyogenes Cas9 amino acid sequence set forth in SEQ ID NO: 1545, or a corresponding segment of a Cas9 polypeptide amino acid sequence set forth in any of SEQ ID NOs: 1-259 and 795-1346; and has a length of 55-60 (e.g., 55, 56, 57, 58, 59, or 60) amino acids.

[0059] In some cases, a short alpha-helix (S717-L727 in the S. pyogenes Cas9 depicted in FIG. 5) can be removed, e.g., to minimize the distance between the end of RuvCI and the beginning of RuvCII. In some cases, a short alpha-helix (S717-L727 in the S. pyogenes Cas9 depicted in FIG. 5) is removed and the RuvCI polypeptide is connected to the RuvCII polypeptide with a linker (e.g., a glycine-serine-serine linker, and as described elsewhere).

[0060] A RuvCII polypeptide can comprise an amino acid sequence having at least 75%, at least 80%, at least 85%, at least 90%, at least 95%, at least 98%, at least 99%, or 100%, amino acid sequence identity to a contiguous stretch of from 40 to 46 amino acids of amino acids 729-775 of the S. pyogenes Cas9 amino acid sequence set forth in SEQ ID NO: 1545, or a corresponding segment of a Cas9 polypeptide amino acid sequence set forth in any of SEQ ID NOs: 1-259 and 795-1346; and can have a length of from 40 amino acids to about 60 amino acids, e.g., from 40 amino acids to 45 amino acids, from 45 amino acids to 50 amino acids, from 50 amino acids to 55 amino acids, or from 55 amino acids to 60 amino acids. In some cases, a RuvCII polypeptide comprises an amino acid sequence having at least 75%, at least 80%, at least 85%, at least 90%, at least 95%, at least 98%, at least 99%, or 100%, amino acid sequence identity to amino acids 728-774 of the S. pyogenes Cas9 amino acid sequence set forth in SEQ ID NO: 1545, or a corresponding segment of a Cas9 polypeptide amino acid sequence set forth in any of SEQ ID NOs: 1-259 and 795-1346; and has a length of 45-50 (e.g., 45, 46, 47, 48, 49, or 50) amino acids.

[0061] An HNH polypeptide can comprise an amino acid sequence having at least 75%, at least 80%, at least 85%, at least 90%, at least 95%, at least 98%, at least 99%, or 100%, amino acid sequence identity to a contiguous stretch of from 100 to 134 amino acids of amino acids 776-909 of the S. pyogenes Cas9 amino acid sequence set forth in SEQ ID NO: 1545, or a corresponding segment of a Cas9 polypeptide amino acid sequence set forth in any of SEQ ID NOs: 1-259 and 795-1346; and can have a length of from 90 amino acids to 150 amino acids, e.g., from 90 amino acids to 95 amino acids, from 95 to amino acids to 100 amino acids, from 100 amino acids to 125 amino acids, from 125 amino acids to 130 amino acids, from 130 amino acids to 135 amino acids, from 135 amino acids to 140 amino acids, from 140 amino acids to 145 amino acids, or from 145 amino acids to 150 amino acids. In some cases, an HNH polypeptide comprises an amino acid sequence having at least 75%, at least 80%, at least 85%, at least 90%, at least 95%, at least 98%, at least 99%, or 100%, amino acid sequence identity to amino acids 776-909 of the S. pyogenes Cas9 amino acid sequence set forth in SEQ ID NO: 1545, or a corresponding segment of a Cas9 polypeptide amino acid sequence set forth in any of SEQ ID NOs: 1-259 and 795-1346; and has a length of from 130 amino acids to 140 amino acids (e.g., 130, 131, 132, 133, 134, 135, 136, 137, 138, 139, or 140 amino acids).

[0062] A RuvCIII polypeptide can comprise an amino acid sequence having at least 75%, at least 80%, at least 85%, at least 90%, at least 95%, at least 98%, at least 99%, or 100%, amino acid sequence identity to a contiguous stretch of from 150 amino acids to 190 amino acids of amino acids 910 to 1099 of the S. pyogenes Cas9 amino acid sequence set forth in SEQ ID NO: 1545, or a corresponding segment of a Cas9 polypeptide amino acid sequence set forth in any of SEQ ID NOs: 1-259 and 795-1346; and can have a length of from 150 amino acids to 160 amino acids, from 160 amino acids to 170 amino acids, from 170 amino acids to 180 amino acids, from 180 amino acids to 190 amino acids, from 190 amino acids to 200 amino acids, from 200 amino acids to 210 amino acids, or from 210 amino acids to 220 amino acids. In some cases, a RuvCIII polypeptide comprises an amino acid sequence having at least 75%, at least 80%, at least 85%, at least 90%, at least 95%, at least 98%, at least 99%, or 100%, amino acid sequence identity to amino acids 910 to 1099 of the S. pyogenes Cas9 amino acid sequence set forth in SEQ ID NO: 1545, or a corresponding segment of a Cas9 polypeptide amino acid sequence set forth in any of SEQ ID NOs: 1-259 and 795-1346; and has a length of from 180 amino acids to 190 amino acids (e.g., 180, 181, 182, 183, 184, 185, 186, 187, 188, 189, or 190 amino acids).

[0063] A PAM-interacting polypeptide can comprise an amino acid sequence having at least 75%, at least 80%, at least 85%, at least 90%, at least 95%, at least 98%, at least 99%, or 100%, amino acid sequence identity to a contiguous stretch of from 200 amino acids to 268 amino acids of amino acids 1100 to 1367 of the S. pyogenes Cas9 amino acid sequence set forth in SEQ ID NO: 1545, or a corresponding segment of a Cas9 polypeptide amino acid sequence set forth in any of SEQ ID NOs: 1-259 and 795-1346; and can have a length of from 240 amino acids to 280 amino acids, e.g., from 240 amino acids to 250 amino acids, from 250 amino acids to 260 amino acids, from 260 amino acids to 270 amino acids, or from 270 amino acids to 280 amino acids. In some cases, a PAM-interacting polypeptide comprises an amino acid sequence having at least 75%, at least 80%, at least 85%, at least 90%, at least 95%, at least 98%, at least 99%, or 100%, amino acid sequence identity to amino acids 1100 to 1367 of the S. pyogenes Cas9 amino acid sequence set forth in SEQ ID NO: 1545, or a corresponding segment of a Cas9 polypeptide amino acid sequence set forth in any of SEQ ID NOs: 1-259 and 795-1346; and has a length of from 260 amino acids to 270 amino acids (e.g., 260, 261, 262, 263, 264, 265, 266, 267, 268, 269, or 270 amino acids).

[0064] Heterologous Subcellular Localization Sequences

[0065] In some cases, the first fusion polypeptide comprises a heterologous sequence that provides for subcellular localization (e.g., an NLS for targeting to the nucleus; a mitochondrial localization signal for targeting to the mitochondria; a chloroplast localization signal for targeting to a chloroplast; an ER retention signal; and the like). In some cases, the first fusion polypeptide includes 2 or more, 3 or more, 4 or more, or 5 or more NLSs. In some cases, an NLS is located at or near (e.g., within 75 amino acids, 50 amino acids, or 30 amino acids) the N-terminus and/or at or near (e.g., within 75 amino acids, 50 amino acids, or 30 amino acids) the C-terminus.

[0066] In some cases, the first fusion polypeptide comprises an NLS. For example, in some cases, the first fusion polypeptide comprises, in order from N-terminus to C-terminus: a) an NLS; b) a first fusion partner; and c) a first polypeptide comprising: i) a RuvCI polypeptide; ii) a RuvCII polypeptide; iii) an HNH polypeptide; iv) a RuvCIII polypeptide; and v) a PAM-interacting polypeptide. In some cases, the first fusion polypeptide comprises an NLS. For example, in some cases, the first fusion polypeptide comprises, in order from N-terminus to C-terminus: a) an NLS; b) a first fusion partner; c) a first polypeptide comprising: i) a RuvCI polypeptide; ii) a RuvCII polypeptide; iii) an HNH polypeptide; iv) a RuvCIII polypeptide; and v) a PAM-interacting polypeptide; and d) an NLS. In some cases, the first fusion polypeptide comprises an NLS. For example, in some cases, the first fusion polypeptide comprises, in order from N-terminus to C-terminus: a) an NLS; b) a first fusion partner; c) a first polypeptide comprising: i) a RuvCI polypeptide; ii) a RuvCII polypeptide; iii) an HNH polypeptide; iv) a RuvCIII polypeptide; and v) a PAM-interacting polypeptide; and d) an NLS. In some cases, the first fusion polypeptide comprises an NLS. In some cases, the first fusion polypeptide comprises, in order from N-terminus to C-terminus: a) an NLS; b) a first polypeptide comprising: i) a RuvCI polypeptide; ii) a RuvCII polypeptide; iii) an HNH polypeptide; iv) a RuvCIII polypeptide; and v) a PAM-interacting polypeptide; and c) a first fusion partner. In some cases, the first fusion polypeptide comprises, in order from N-terminus to C-terminus: a) an NLS; b) a first polypeptide comprising: i) a RuvCI polypeptide; ii) a RuvCII polypeptide; iii) an HNH polypeptide; iv) a RuvCIII polypeptide; and v) a PAM-interacting polypeptide; c) a first fusion partner; and d) an NLS. In some cases, the NLS comprises the amino acid sequence MAPKKKRKVGIHGVPAA (SEQ ID NO: 1546). In some cases, the NLS comprises the amino acid sequence KRPAATKKAGQAKKKK (SEQ ID NO: 1547). Other suitable NLS are described elsewhere herein.

[0067] An NLS can be at or near the N-terminus and/or the C-terminus. In some cases, the first fusion polypeptide comprises two or more NLSs (e.g., 3 or more, 4 or more, or 5 or more NLSs). In some cases, the first fusion polypeptide comprises one or more NLSs (e.g., 2 or more, 3 or more, or 4 or more NLSs) at or near the N-terminus and/or one or more NLSs (e.g., 2 or more, 3 or more, or 4 or more NLSs) at or near the C-terminus. The term “at or near” is used here because, as is known in the art, the NLS need not be at the actual terminus of a protein, but can be positioned near (e.g., within 100 amino acids of) an N- and/or C-terminus (e.g., within 80, within 75, within 60, within 55, within 50, within 45, within 40, within 35, or within 30 amino acids of the an N-and/or C-terminus).

[0068] Fusion Partner at or Near N-Terminus of First Fusion Polypeptide

[0069] In some cases, the first fusion polypeptide comprises, in order from N-terminus to C-terminus: a) a first fusion partner; and b) a first polypeptide comprising: i) a RuvCI polypeptide; ii) a RuvCII polypeptide; iii) an HNH polypeptide; iv) a RuvCIII polypeptide; and v) a PAM-interacting polypeptide.

[0070] In some cases, a first fusion polypeptide comprises one or more linker polypeptides. For example, a linker polypeptide can be interposed between any of: a) an NLS and a fusion partner; b) a fusion partner and a RuvCI polypeptide; c) a RuvCI polypeptide and a RuvCII polypeptide; and d) a PAM-interacting polypeptide and an NLS.

[0071] The linker polypeptide may have any of a variety of amino acid sequences. Proteins can be joined by a spacer peptide, generally of a flexible nature, although other chemical linkages are not excluded. Suitable linkers include polypeptides of between about 6 amino acids and about 40 amino acids in length, or between about 6 amino acids and about 25 amino acids in length. These linkers are generally produced by using synthetic, linker-encoding oligonucleotides to couple the proteins. Peptide linkers with a degree of flexibility will generally be preferred. The linking peptides may have virtually any amino acid sequence, bearing in mind that the preferred linkers will have a sequence that results in a generally flexible peptide. The use of small amino acids, such as glycine and alanine, are of use in creating a flexible peptide. The creation of such sequences is routine to those of skill in the art. A variety of different linkers are commercially available and are considered suitable for use.

[0072] Exemplary polypeptide linkers include glycine polymers (G)ₙ, glycine-serine polymers (including, for example, (GS)ₙ, GSGGSₙ (SEQ ID NO: 1548) and GGGSₙ (SEQ ID NO: 1549), where n is an integer of at least one), glycine-alanine polymers, alanine-serine polymers. Exemplary linkers can comprise amino acid sequences including, but not limited to, GGSG (SEQ ID NO: 1550), GGSGG (SEQ ID NO: 1551), GSGSG (SEQ ID NO: 1552), GSGGG (SEQ ID NO: 1553), GGGSG (SEQ ID NO: 1554), GSSSG (SEQ ID NO: 1555), and the like. The ordinarily skilled artisan will recognize that design of a peptide conjugated to any elements described above can include linkers that are all or partially flexible, such that the linker can include a flexible linker as well as one or more portions that confer less flexible structure.

[0073] Fusion Partner at or Near C-Terminus of First Fusion Polypeptide

[0074] In some cases, the first fusion polypeptide comprises, in order from N-terminus to C-terminus: a) a first polypeptide comprising: i) a RuvCI polypeptide; ii) a RuvCII polypeptide; iii) an HNH polypeptide; iv) a RuvCIII polypeptide; and v) a PAM-interacting polypeptide; and b) a first fusion partner.

[0075] In some cases, a first fusion polypeptide comprises one or more linker polypeptides. For example, a linker polypeptide can be interposed between any of: a) an NLS and a RuvCI polypeptide; b) a RuvCI polypeptide and a RuvCII polypeptide; c) a PAM-interacting polypeptide and an NLS; d) a PAM-interacting polypeptide and a second fusion partner; and e) a fusion partner and an NLS. Suitable linker polypeptides are as described above.

[0076] Fusion Partner Located Internally within First Fusion Polypeptide

[0077] In some cases, the fusion partner is located internally with the first polypeptide. In some cases, the first fusion partner is inserted within the HNH polypeptide. In some cases, the first fusion partner is inserted within the RuvCIII polypeptide.

[0078] Fusion Partner Inserted into HNH Polypeptide

[0079] In some cases, the first fusion partner is inserted within the HNH polypeptide. The HNH polypeptide of S. pyogenes Cas9 is amino acids 776-909 of the amino acid sequence set forth in SEQ ID NO: 1545. For example, in some cases, the first fusion partner is inserted in a site within amino acids 800 to 900 of amino acids 776-909 of the amino acid sequence of the S. pyogenes Cas9 amino acid sequence set forth in SEQ ID NO: 1545, or a corresponding segment of a Cas9 polypeptide amino acid sequence set forth in any of SEQ ID NOs: 1-259 and 795-1346. For example, in some cases, the first fusion partner is inserted at or near amino acid 868 of amino acids 776-909 of the amino acid sequence of the S. pyogenes Cas9 amino acid sequence set forth in SEQ ID NO: 1545, or a corresponding segment of a Cas9 polypeptide amino acid sequence set forth in any of SEQ ID NOs: 1-259 and 795-1346. In some cases, the first fusion partner is inserted at amino acid 868 of amino acids 776-909 of the amino acid sequence of the S. pyogenes Cas9 amino acid sequence set forth in SEQ ID NO: 1545, or a corresponding segment of a Cas9 polypeptide amino acid sequence set forth in any of SEQ ID NOs: 1-259 and 795-1346. In some cases, the first fusion partner is inserted at amino acid 860 of amino acids 776-909 of the amino acid sequence of the S. pyogenes Cas9 amino acid sequence set forth in SEQ ID NO: 1545, or a corresponding segment of a Cas9 polypeptide amino acid sequence set forth in any of SEQ ID NOs: 1-259 and 795-1346. In some cases, the first fusion partner is inserted at amino acid 861 of amino acids 776-909 of the amino acid sequence of the S. pyogenes Cas9 amino acid sequence set forth in SEQ ID NO: 1545, or a corresponding segment of a Cas9 polypeptide amino acid sequence set forth in any of SEQ ID NOs: 1-259 and 795-1346. In some cases, the first fusion partner is inserted at amino acid 862 of amino acids 776-909 of the amino acid sequence of the S. pyogenes Cas9 amino acid sequence set forth in SEQ ID NO: 1545, or a corresponding segment of a Cas9 polypeptide amino acid sequence set forth in any of SEQ ID NOs: 1-259 and 795-1346. In some cases, the first fusion partner is inserted at amino acid 863 of amino acids 776-909 of the amino acid sequence of the S. pyogenes Cas9 amino acid sequence set forth in SEQ ID NO: 1545, or a corresponding segment of a Cas9 polypeptide amino acid sequence set forth in any of SEQ ID NOs: 1-259 and 795-1346. In some cases, the first fusion partner is inserted at amino acid 864 of amino acids 776-909 of the amino acid sequence of the S. pyogenes Cas9 amino acid sequence set forth in SEQ ID NO: 1545, or a corresponding segment of a Cas9 polypeptide amino acid sequence set forth in any of SEQ ID NOs: 1-259 and 795-1346. In some cases, the first fusion partner is inserted at amino acid 865 of amino acids 776-909 of the amino acid sequence of the S. pyogenes Cas9 amino acid sequence set forth in SEQ ID NO: 1545, or a corresponding segment of a Cas9 polypeptide amino acid sequence set forth in any of SEQ ID NOs: 1-259 and 795-1346. In some cases, the first fusion partner is inserted at amino acid 866 of amino acids 776-909 of the amino acid sequence of the S. pyogenes Cas9 amino acid sequence set forth in SEQ ID NO: 1545, or a corresponding segment of a Cas9 polypeptide amino acid sequence set forth in any of SEQ ID NOs: 1-259 and 795-1346. In some cases, the first fusion partner is inserted at amino acid 867 of amino acids 776-909 of the amino acid sequence of the S. pyogenes Cas9 amino acid sequence set forth in SEQ ID NO: 1545, or a corresponding segment of a Cas9 polypeptide amino acid sequence set forth in any of SEQ ID NOs: 1-259 and 795-1346. In some cases, the first fusion partner is inserted at amino acid 869 of amino acids 776-909 of the amino acid sequence of the S. pyogenes Cas9 amino acid sequence set forth in SEQ ID NO: 1545, or a corresponding segment of a Cas9 polypeptide amino acid sequence set forth in any of SEQ ID NOs: 1-259 and 795-1346. In some cases, the first fusion partner is inserted at amino acid 870 of amino acids 776-909 of the amino acid sequence of the S. pyogenes Cas9 amino acid sequence set forth in SEQ ID NO: 1545, or a corresponding segment of a Cas9 polypeptide amino acid sequence set forth in any of SEQ ID NOs: 1-259 and 795-1346. In some cases, the first fusion partner is inserted at amino acid 871 of amino acids 776-909 of the amino acid sequence of the S. pyogenes Cas9 amino acid sequence set forth in SEQ ID NO: 1545, or a corresponding segment of a Cas9 polypeptide amino acid sequence set forth in any of SEQ ID NOs: 1-259 and 795-1346. In some cases, the first fusion partner is inserted at amino acid 872 of amino acids 776-909 of the amino acid sequence of the S. pyogenes Cas9 amino acid sequence set forth in SEQ ID NO: 1545, or a corresponding segment of a Cas9 polypeptide amino acid sequence set forth in any of SEQ ID NOs: 1-259 and 795-1346. In some cases, the first fusion partner is inserted at amino acid 873 of amino acids 776-909 of the amino acid sequence of the S. pyogenes Cas9 amino acid sequence set forth in SEQ ID NO: 1545, or a corresponding segment of a Cas9 polypeptide amino acid sequence set forth in any of SEQ ID NOs: 1-259 and 795-1346. In some cases, the first fusion partner is inserted at amino acid 874 of amino acids 776-909 of the amino acid sequence of the S. pyogenes Cas9 amino acid sequence set forth in SEQ ID NO: 1545, or a corresponding segment of a Cas9 polypeptide amino acid sequence set forth in any of SEQ ID NOs: 1-259 and 795-1346. In some cases, the first fusion partner is inserted at amino acid 875 of amino acids 776-909 of the amino acid sequence of the S. pyogenes Cas9 amino acid sequence set forth in SEQ ID NO: 1545, or a corresponding segment of a Cas9 polypeptide amino acid sequence set forth in any of SEQ ID NOs: 1-259 and 795-1346.

[0080] As one non-limiting example, the first fusion polypeptide can comprise, in order from N-terminus to C-terminus: i) a RuvCI polypeptide; ii) a RuvCII polypeptide; iii) an N-terminal portion of an HNH polypeptide; iv) a first fusion partner; v) a C-terminal portion of an HNH polypeptide; vi) a RuvCIII polypeptide; and v) a PAM-interacting polypeptide.

[0081] An N-terminal portion of an HNH polypeptide can comprise an amino acid sequence having at least 75%, at least 80%, at least 85%, at least 90%, at least 95%, at least 98%, at least 99%, or 100%, amino acid sequence identity to a contiguous stretch of from 80 amino acids to 92 amino acids of amino acids 776 to 867 of the S. pyogenes Cas9 amino acid sequence set forth in SEQ ID NO: 1545, or a corresponding segment of a Cas9 polypeptide amino acid sequence set forth in any of SEQ ID NOs: 1-259 and 795-1346; and can have a length of from 80 amino acids to 110 amino acids, e.g., from 80 amino acids to 90 amino acids, from 90 amino acids to 100 amino acids, or from 100 amino acids to 110 amino acids. In some cases, an N-terminal portion of an HNH polypeptide comprises an amino acid sequence having at least 75%, at least 80%, at least 85%, at least 90%, at least 95%, at least 98%, at least 99%, or 100%, amino acid sequence identity to amino acids 776 to 867 of the S. pyogenes Cas9 amino acid sequence set forth in SEQ ID NO: 1545, or a corresponding segment of a Cas9 polypeptide amino acid sequence set forth in any of SEQ ID NOs: 1-259 and 795-1346; and has a length of 85 amino acids to 95 amino acids (85, 86, 87, 88, 89, 90, 91, 92, 93, 94, or 95 amino acids). An N-terminal portion of an HNH polypeptide can comprise an amino acid sequence having at least 75%, at least 80%, at least 85%, at least 90%, at least 95%, at least 98%, at least 99%, or 100%, amino acid sequence identity to a contiguous stretch of from 50 amino acids to 66 amino acids of amino acids 776-841 of the S. pyogenes Cas9 amino acid sequence set forth in SEQ ID NO: 1545, or a corresponding segment of a Cas9 polypeptide amino acid sequence set forth in any of SEQ ID NOs: 1-259 and 795-1346; and can have a length of from 50 amino acids to 80 amino acids, e.g., from 50 amino acids to 60 amino acids, from 60 amino acids to 70 amino acids, or from 70 amino acids to 80 amino acids.

[0082] A C-terminal portion of an HNH polypeptide can comprise an amino acid sequence having at least 75%, at least 80%, at least 85%, at least 90%, at least 95%, at least 98%, at least 99%, or 100%, amino acid sequence identity to a contiguous stretch of from 35 to 42 amino acids of amino acids 868-909 of the S. pyogenes Cas9 amino acid sequence set forth in SEQ ID NO: 1545, or a corresponding segment of a Cas9 polypeptide amino acid sequence set forth in any of SEQ ID NOs: 1-259 and 795-1346; and can have a length of from 35 to 42 amino acids (e.g., 35, 36, 37, 38, 39, 40, 41, or 42 amino acids). A C-terminal portion of an HNH polypeptide can comprise an amino acid sequence having at least 75%, at least 80%, at least 85%, at least 90%, at least 95%, at least 98%, at least 99%, or 100%, amino acid sequence identity to a contiguous stretch of from 50 amino acids to 67 amino acids of amino acids 842-909 of the S. pyogenes Cas9 amino acid sequence set forth in SEQ ID NO: 1545, or a corresponding segment of a Cas9 polypeptide amino acid sequence set forth in any of SEQ ID NOs: 1-259 and 795-1346; and can have a length of from 50 amino acids to 80 amino acids, e.g., from 50 amino acids to 60 amino acids, from 60 amino acids to 70 amino acids, or from 70 amino acids to 80 amino acids.

[0083] For example, in some cases, the first fusion polypeptide comprises, in order from N-terminus to C-terminus: i) a RuvCI polypeptide; ii) a RuvCII polypeptide; iii) an N-terminal portion of an HNH polypeptide comprising an amino acid sequence having at least 75%, at least 80%, at least 85%, at least 90%, at least 95%, at least 98%, at least 99%, or 100%, amino acid sequence identity to amino acids 719 to 860 of the S. pyogenes Cas9 amino acid sequence set forth in SEQ ID NO: 1545, or a corresponding segment of a Cas9 polypeptide amino acid sequence set forth in any of SEQ ID NOs: 1-259 and 795-1346; iv) a first fusion partner; v) a C-terminal portion of an HNH polypeptide comprising an amino acid sequence having at least 75%, at least 80%, at least 85%, at least 90%, at least 95%, at least 98%, at least 99%, or 100%, amino acid sequence identity to amino acids 861 to 909 of the S. pyogenes Cas9 amino acid sequence set forth in SEQ ID NO: 1545, or a corresponding segment of a Cas9 polypeptide amino acid sequence set forth in any of SEQ ID NOs: 1-259 and 795-1346; vi) a RuvCIII polypeptide; and vii) a PAM-interacting polypeptide.

[0084] As another example, in some cases, the first fusion polypeptide comprises, in order from N-terminus to C-terminus: i) a RuvCI polypeptide; ii) a RuvCII polypeptide; iii) an N-terminal portion of an HNH polypeptide comprising an amino acid sequence having at least 75%, at least 80%, at least 85%, at least 90%, at least 95%, at least 98%, at least 99%, or 100%, amino acid sequence identity to amino acids 719 to 861 of the S. pyogenes Cas9 amino acid sequence set forth in SEQ ID NO: 1545, or a corresponding segment of a Cas9 polypeptide amino acid sequence set forth in any of SEQ ID NOs: 1-259 and 795-1346; iv) a first fusion partner; v) a C-terminal portion of an HNH polypeptide comprising an amino acid sequence having at least 75%, at least 80%, at least 85%, at least 90%, at least 95%, at least 98%, at least 99%, or 100%, amino acid sequence identity to amino acids 862 to 909 of the S. pyogenes Cas9 amino acid sequence set forth in SEQ ID NO: 1545, or a corresponding segment of a Cas9 polypeptide amino acid sequence set forth in any of SEQ ID NOs: 1-259 and 795-1346; vi) a RuvCIII polypeptide; and vii) a PAM-interacting polypeptide.

[0085] As another example, in some cases, the first fusion polypeptide comprises, in order from N-terminus to C-terminus: i) a RuvCI polypeptide; ii) a RuvCII polypeptide; iii) an N-terminal portion of an HNH polypeptide comprising an amino acid sequence having at least 75%, at least 80%, at least 85%, at least 90%, at least 95%, at least 98%, at least 99%, or 100%, amino acid sequence identity to amino acids 719 to 862 of the S. pyogenes Cas9 amino acid sequence set forth in SEQ ID NO: 1545, or a corresponding segment of a Cas9 polypeptide amino acid sequence set forth in any of SEQ ID NOs: 1-259 and 795-1346; iv) a first fusion partner; v) a C-terminal portion of an HNH polypeptide comprising an amino acid sequence having at least 75%, at least 80%, at least 85%, at least 90%, at least 95%, at least 98%, at least 99%, or 100%, amino acid sequence identity to amino acids 863 to 909 of the S. pyogenes Cas9 amino acid sequence set forth in SEQ ID NO: 1545, or a corresponding segment of a Cas9 polypeptide amino acid sequence set forth in any of SEQ ID NOs: 1-259 and 795-1346; vi) a RuvCIII polypeptide; and vii) a PAM-interacting polypeptide.

[0086] As another example, in some cases, the first fusion polypeptide comprises, in order from N-terminus to C-terminus: i) a RuvCI polypeptide; ii) a RuvCII polypeptide; iii) an N-terminal portion of an HNH polypeptide comprising an amino acid sequence having at least 75%, at least 80%, at least 85%, at least 90%, at least 95%, at least 98%, at least 99%, or 100%, amino acid sequence identity to amino acids 719 to 863 of the S. pyogenes Cas9 amino acid sequence set forth in SEQ ID NO: 1545, or a corresponding segment of a Cas9 polypeptide amino acid sequence set forth in any of SEQ ID NOs: 1-259 and 795-1346; iv) a first fusion partner; v) a C-terminal portion of an HNH polypeptide comprising an amino acid sequence having at least 75%, at least 80%, at least 85%, at least 90%, at least 95%, at least 98%, at least 99%, or 100%, amino acid sequence identity to amino acids 864 to 909 of the S. pyogenes Cas9 amino acid sequence set forth in SEQ ID NO: 1545, or a corresponding segment of a Cas9 polypeptide amino acid sequence set forth in any of SEQ ID NOs: 1-259 and 795-1346; vi) a RuvCIII polypeptide; and vii) a PAM-interacting polypeptide.

[0087] As another example, in some cases, the first fusion polypeptide comprises, in order from N-terminus to C-terminus: i) a RuvCI polypeptide; ii) a RuvCII polypeptide; iii) an N-terminal portion of an HNH polypeptide comprising an amino acid sequence having at least 75%, at least 80%, at least 85%, at least 90%, at least 95%, at least 98%, at least 99%, or 100%, amino acid sequence identity to amino acids 719 to 864 of the S. pyogenes Cas9 amino acid sequence set forth in SEQ ID NO: 1545, or a corresponding segment of a Cas9 polypeptide amino acid sequence set forth in any of SEQ ID NOs: 1-259 and 795-1346; iv) a first fusion partner; v) a C-terminal portion of an HNH polypeptide comprising an amino acid sequence having at least 75%, at least 80%, at least 85%, at least 90%, at least 95%, at least 98%, at least 99%, or 100%, amino acid sequence identity to amino acids 865 to 909 of the S. pyogenes Cas9 amino acid sequence set forth in SEQ ID NO: 1545, or a corresponding segment of a Cas9 polypeptide amino acid sequence set forth in any of SEQ ID NOs: 1-259 and 795-1346; vi) a RuvCIII polypeptide; and vii) a PAM-interacting polypeptide.

[0088] As another example, in some cases, the first fusion polypeptide comprises, in order from N-terminus to C-terminus: i) a RuvCI polypeptide; ii) a RuvCII polypeptide; iii) an N-terminal portion of an HNH polypeptide comprising an amino acid sequence having at least 75%, at least 80%, at least 85%, at least 90%, at least 95%, at least 98%, at least 99%, or 100%, amino acid sequence identity to amino acids 719 to 865 of the S. pyogenes Cas9 amino acid sequence set forth in SEQ ID NO: 1545, or a corresponding segment of a Cas9 polypeptide amino acid sequence set forth in any of SEQ ID NOs: 1-259 and 795-1346; iv) a first fusion partner; v) a C-terminal portion of an HNH polypeptide comprising an amino acid sequence having at least 75%, at least 80%, at least 85%, at least 90%, at least 95%, at least 98%, at least 99%, or 100%, amino acid sequence identity to amino acids 866 to 909 of the S. pyogenes Cas9 amino acid sequence set forth in SEQ ID NO: 1545, or a corresponding segment of a Cas9 polypeptide amino acid sequence set forth in any of SEQ ID NOs: 1-259 and 795-1346; vi) a RuvCIII polypeptide; and vii) a PAM-interacting polypeptide.

[0089] As another example, in some cases, the first fusion polypeptide comprises, in order from N-terminus to C-terminus: i) a RuvCI polypeptide; ii) a RuvCII polypeptide; iii) an N-terminal portion of an HNH polypeptide comprising an amino acid sequence having at least 75%, at least 80%, at least 85%, at least 90%, at least 95%, at least 98%, at least 99%, or 100%, amino acid sequence identity to amino acids 719 to 866 of the S. pyogenes Cas9 amino acid sequence set forth in SEQ ID NO: 1545, or a corresponding segment of a Cas9 polypeptide amino acid sequence set forth in any of SEQ ID NOs: 1-259 and 795-1346; iv) a first fusion partner; v) a C-terminal portion of an HNH polypeptide comprising an amino acid sequence having at least 75%, at least 80%, at least 85%, at least 90%, at least 95%, at least 98%, at least 99%, or 100%, amino acid sequence identity to amino acids 867 to 909 of the S. pyogenes Cas9 amino acid sequence set forth in SEQ ID NO: 1545, or a corresponding segment of a Cas9 polypeptide amino acid sequence set forth in any of SEQ ID NOs: 1-259 and 795-1346; vi) a RuvCIII polypeptide; and vii) a PAM-interacting polypeptide.

[0090] As another example, in some cases, the first fusion polypeptide comprises, in order from N-terminus to C-terminus: i) a RuvCI polypeptide; ii) a RuvCII polypeptide; iii) an N-terminal portion of an HNH polypeptide comprising an amino acid sequence having at least 75%, at least 80%, at least 85%, at least 90%, at least 95%, at least 98%, at least 99%, or 100%, amino acid sequence identity to amino acids 719 to 867 of the S. pyogenes Cas9 amino acid sequence set forth in SEQ ID NO: 1545, or a corresponding segment of a Cas9 polypeptide amino acid sequence set forth in any of SEQ ID NOs: 1-259 and 795-1346; iv) a first fusion partner; v) a C-terminal portion of an HNH polypeptide comprising an amino acid sequence having at least 75%, at least 80%, at least 85%, at least 90%, at least 95%, at least 98%, at least 99%, or 100%, amino acid sequence identity to amino acids 868 to 909 of the S. pyogenes Cas9 amino acid sequence set forth in SEQ ID NO: 1545, or a corresponding segment of a Cas9 polypeptide amino acid sequence set forth in any of SEQ ID NOs: 1-259 and 795-1346; vi) a RuvCIII polypeptide; and v) a PAM-interacting polypeptide.

[0091] As another example, in some cases, the first fusion polypeptide comprises, in order from N-terminus to C-terminus: i) a RuvCI polypeptide; ii) a RuvCII polypeptide; iii) an N-terminal portion of an HNH polypeptide comprising an amino acid sequence having at least 75%, at least 80%, at least 85%, at least 90%, at least 95%, at least 98%, at least 99%, or 100%, amino acid sequence identity to amino acids 719 to 868 of the S. pyogenes Cas9 amino acid sequence set forth in SEQ ID NO: 1545, or a corresponding segment of a Cas9 polypeptide amino acid sequence set forth in any of SEQ ID NOs: 1-259 and 795-1346; iv) a first fusion partner; v) a C-terminal portion of an HNH polypeptide comprising an amino acid sequence having at least 75%, at least 80%, at least 85%, at least 90%, at least 95%, at least 98%, at least 99%, or 100%, amino acid sequence identity to amino acids 869 to 909 of the S. pyogenes Cas9 amino acid sequence set forth in SEQ ID NO: 1545, or a corresponding segment of a Cas9 polypeptide amino acid sequence set forth in any of SEQ ID NOs: 1-259 and 795-1346; vi) a RuvCIII polypeptide; and vii) a PAM-interacting polypeptide.

[0092] As another example, in some cases, the first fusion polypeptide comprises, in order from N-terminus to C-terminus: i) a RuvCI polypeptide; ii) a RuvCII polypeptide; iii) an N-terminal portion of an HNH polypeptide comprising an amino acid sequence having at least 75%, at least 80%, at least 85%, at least 90%, at least 95%, at least 98%, at least 99%, or 100%, amino acid sequence identity to amino acids 719 to 869 of the S. pyogenes Cas9 amino acid sequence set forth in SEQ ID NO: 1545, or a corresponding segment of a Cas9 polypeptide amino acid sequence set forth in any of SEQ ID NOs: 1-259 and 795-1346; iv) a first fusion partner; v) a C-terminal portion of an HNH polypeptide comprising an amino acid sequence having at least 75%, at least 80%, at least 85%, at least 90%, at least 95%, at least 98%, at least 99%, or 100%, amino acid sequence identity to amino acids 870 to 909 of the S. pyogenes Cas9 amino acid sequence set forth in SEQ ID NO: 1545, or a corresponding segment of a Cas9 polypeptide amino acid sequence set forth in any of SEQ ID NOs: 1-259 and 795-1346; vi) a RuvCIII polypeptide; and vii) a PAM-interacting polypeptide.

[0093] As another example, in some cases, the first fusion polypeptide comprises, in order from N-terminus to C-terminus: i) a RuvCI polypeptide; ii) a RuvCII polypeptide; iii) an N-terminal portion of an HNH polypeptide comprising an amino acid sequence having at least 75%, at least 80%, at least 85%, at least 90%, at least 95%, at least 98%, at least 99%, or 100%, amino acid sequence identity to amino acids 719 to 870 of the S. pyogenes Cas9 amino acid sequence set forth in SEQ ID NO: 1545, or a corresponding segment of a Cas9 polypeptide amino acid sequence set forth in any of SEQ ID NOs: 1-259 and 795-1346; iv) a first fusion partner; v) a C-terminal portion of an HNH polypeptide comprising an amino acid sequence having at least 75%, at least 80%, at least 85%, at least 90%, at least 95%, at least 98%, at least 99%, or 100%, amino acid sequence identity to amino acids 871 to 909 of the S. pyogenes Cas9 amino acid sequence set forth in SEQ ID NO: 1545, or a corresponding segment of a Cas9 polypeptide amino acid sequence set forth in any of SEQ ID NOs: 1-259 and 795-1346; vi) a RuvCIII polypeptide; and vii) a PAM-interacting polypeptide.

[0094] As another example, in some cases, the first fusion polypeptide comprises, in order from N-terminus to C-terminus: i) a RuvCI polypeptide; ii) a RuvCII polypeptide; iii) an N-terminal portion of an HNH polypeptide comprising an amino acid sequence having at least 75%, at least 80%, at least 85%, at least 90%, at least 95%, at least 98%, at least 99%, or 100%, amino acid sequence identity to amino acids 719 to 871 of the S. pyogenes Cas9 amino acid sequence set forth in SEQ ID NO: 1545, or a corresponding segment of a Cas9 polypeptide amino acid sequence set forth in any of SEQ ID NOs: 1-259 and 795-1346; iv) a first fusion partner; v) a C-terminal portion of an HNH polypeptide comprising an amino acid sequence having at least 75%, at least 80%, at least 85%, at least 90%, at least 95%, at least 98%, at least 99%, or 100%, amino acid sequence identity to amino acids 872 to 909 of the S. pyogenes Cas9 amino acid sequence set forth in SEQ ID NO: 1545, or a corresponding segment of a Cas9 polypeptide amino acid sequence set forth in any of SEQ ID NOs: 1-259 and 795-1346; vi) a RuvCIII polypeptide; and vii) a PAM-interacting polypeptide.

[0095] As another example, in some cases, the first fusion polypeptide comprises, in order from N-terminus to C-terminus: i) a RuvCI polypeptide; ii) a RuvCII polypeptide; iii) an N-terminal portion of an HNH polypeptide comprising an amino acid sequence having at least 75%, at least 80%, at least 85%, at least 90%, at least 95%, at least 98%, at least 99%, or 100%, amino acid sequence identity to amino acids 719 to 872 of the S. pyogenes Cas9 amino acid sequence set forth in SEQ ID NO: 1545, or a corresponding segment of a Cas9 polypeptide amino acid sequence set forth in any of SEQ ID NOs: 1-259 and 795-1346; iv) a first fusion partner; v) a C-terminal portion of an HNH polypeptide comprising an amino acid sequence having at least 75%, at least 80%, at least 85%, at least 90%, at least 95%, at least 98%, at least 99%, or 100%, amino acid sequence identity to amino acids 873 to 909 of the S. pyogenes Cas9 amino acid sequence set forth in SEQ ID NO: 1545, or a corresponding segment of a Cas9 polypeptide amino acid sequence set forth in any of SEQ ID NOs: 1-259 and 795-1346; vi) a RuvCIII polypeptide; and vii) a PAM-interacting polypeptide.

[0096] As another example, in some cases, the first fusion polypeptide comprises, in order from N-terminus to C-terminus: i) a RuvCI polypeptide; ii) a RuvCII polypeptide; iii) an N-terminal portion of an HNH polypeptide comprising an amino acid sequence having at least 75%, at least 80%, at least 85%, at least 90%, at least 95%, at least 98%, at least 99%, or 100%, amino acid sequence identity to amino acids 719 to 873 of the S. pyogenes Cas9 amino acid sequence set forth in SEQ ID NO: 1545, or a corresponding segment of a Cas9 polypeptide amino acid sequence set forth in any of SEQ ID NOs: 1-259 and 795-1346; iv) a first fusion partner; v) a C-terminal portion of an HNH polypeptide comprising an amino acid sequence having at least 75%, at least 80%, at least 85%, at least 90%, at least 95%, at least 98%, at least 99%, or 100%, amino acid sequence identity to amino acids 874 to 909 of the S. pyogenes Cas9 amino acid sequence set forth in SEQ ID NO: 1545, or a corresponding segment of a Cas9 polypeptide amino acid sequence set forth in any of SEQ ID NOs: 1-259 and 795-1346; vi) a RuvCIII polypeptide; and vii) a PAM-interacting polypeptide.

[0097] As another example, in some cases, the first fusion polypeptide comprises, in order from N-terminus to C-terminus: i) a RuvCI polypeptide; ii) a RuvCII polypeptide; iii) an N-terminal portion of an HNH polypeptide comprising an amino acid sequence having at least 75%, at least 80%, at least 85%, at least 90%, at least 95%, at least 98%, at least 99%, or 100%, amino acid sequence identity to amino acids 719 to 874 of the S. pyogenes Cas9 amino acid sequence set forth in SEQ ID NO: 1545, or a corresponding segment of a Cas9 polypeptide amino acid sequence set forth in any of SEQ ID NOs: 1-259 and 795-1346; iv) a first fusion partner; v) a C-terminal portion of an HNH polypeptide comprising an amino acid sequence having at least 75%, at least 80%, at least 85%, at least 90%, at least 95%, at least 98%, at least 99%, or 100%, amino acid sequence identity to amino acids 875 to 909 of the S. pyogenes Cas9 amino acid sequence set forth in SEQ ID NO: 1545, or a corresponding segment of a Cas9 polypeptide amino acid sequence set forth in any of SEQ ID NOs: 1-259 and 795-1346; vi) a RuvCIII polypeptide; and vii) a PAM-interacting polypeptide.

[0098] Fusion Partner Inserted within RuvCIII Polypeptide

[0099] In some cases, the first fusion partner is inserted within the RuvCIII polypeptide. The RuvCIII polypeptide of S. pyogenes Cas9 is amino acids 910-1099 of the amino acid sequence set forth in SEQ ID NO: 1545. For example, in some cases, the first fusion partner is inserted in a site within amino acids 950 to 1060 of amino acids 910-1099 of the amino acid sequence of the S. pyogenes Cas9 amino acid sequence set forth in SEQ ID NO: 1545, or a corresponding segment of a Cas9 polypeptide amino acid sequence set forth in any of SEQ ID NOs: 1-259 and 795-1346. For example, in some cases, the first fusion partner is inserted at or near amino acid 1016 of amino acids 910-1099 of the amino acid sequence of the S. pyogenes Cas9 amino acid sequence set forth in SEQ ID NO: 1545, or a corresponding segment of a Cas9 polypeptide amino acid sequence set forth in any of SEQ ID NOs: 1-259 and 795-1346. In some cases, the first fusion partner is inserted at amino acid 1016 of amino acids 910-1099 of the amino acid sequence of the S. pyogenes Cas9 amino acid sequence set forth in SEQ ID NO: 1545, or a corresponding segment of a Cas9 polypeptide amino acid sequence set forth in any of SEQ ID NOs: 1-259 and 795-1346. In some cases, the first fusion partner is inserted at amino acid 1010 of amino acids 910-1099 of the amino acid sequence of the S. pyogenes Cas9 amino acid sequence set forth in SEQ ID NO: 1545, or a corresponding segment of a Cas9 polypeptide amino acid sequence set forth in any of SEQ ID NOs: 1-259 and 795-1346. In some cases, the first fusion partner is inserted at amino acid 1011 of amino acids 910-1099 of the amino acid sequence of the S. pyogenes Cas9 amino acid sequence set forth in SEQ ID NO: 1545, or a corresponding segment of a Cas9 polypeptide amino acid sequence set forth in any of SEQ ID NOs: 1-259 and 795-1346. In some cases, the first fusion partner is inserted at amino acid 1012 of amino acids 910-1099 of the amino acid sequence of the S. pyogenes Cas9 amino acid sequence set forth in SEQ ID NO: 1545, or a corresponding segment of a Cas9 polypeptide amino acid sequence set forth in any of SEQ ID NOs: 1-259 and 795-1346. In some cases, the first fusion partner is inserted at amino acid 1013 of amino acids 910-1099 of the amino acid sequence of the S. pyogenes Cas9 amino acid sequence set forth in SEQ ID NO: 1545, or a corresponding segment of a Cas9 polypeptide amino acid sequence set forth in any of SEQ ID NOs: 1-259 and 795-1346. In some cases, the first fusion partner is inserted at amino acid 1014 of amino acids 910-1099 of the amino acid sequence of the S. pyogenes Cas9 amino acid sequence set forth in SEQ ID NO: 1545, or a corresponding segment of a Cas9 polypeptide amino acid sequence set forth in any of SEQ ID NOs: 1-259 and 795-1346. In some cases, the first fusion partner is inserted at amino acid 1015 of amino acids 910-1099 of the amino acid sequence of the S. pyogenes Cas9 amino acid sequence set forth in SEQ ID NO: 1545, or a corresponding segment of a Cas9 polypeptide amino acid sequence set forth in any of SEQ ID NOs: 1-259 and 795-1346. In some cases, the first fusion partner is inserted at amino acid 1017 of amino acids 910-1099 of the amino acid sequence of the S. pyogenes Cas9 amino acid sequence set forth in SEQ ID NO: 1545, or a corresponding segment of a Cas9 polypeptide amino acid sequence set forth in any of SEQ ID NOs: 1-259 and 795-1346. In some cases, the first fusion partner is inserted at amino acid 1018 of amino acids 910-1099 of the amino acid sequence of the S. pyogenes Cas9 amino acid sequence set forth in SEQ ID NO: 1545, or a corresponding segment of a Cas9 polypeptide amino acid sequence set forth in any of SEQ ID NOs: 1-259 and 795-1346. In some cases, the first fusion partner is inserted at amino acid 1019 of amino acids 910-1099 of the amino acid sequence of the S. pyogenes Cas9 amino acid sequence set forth in SEQ ID NO: 1545, or a corresponding segment of a Cas9 polypeptide amino acid sequence set forth in any of SEQ ID NOs: 1-259 and 795-1346. In some cases, the first fusion partner is inserted at amino acid 1020 of amino acids 910-1099 of the amino acid sequence of the S. pyogenes Cas9 amino acid sequence set forth in SEQ ID NO: 1545, or a corresponding segment of a Cas9 polypeptide amino acid sequence set forth in any of SEQ ID NOs: 1-259 and 795-1346. In some cases, the first fusion partner is inserted at amino acid 1021 of amino acids 910-1099 of the amino acid sequence of the S. pyogenes Cas9 amino acid sequence set forth in SEQ ID NO: 1545, or a corresponding segment of a Cas9 polypeptide amino acid sequence set forth in any of SEQ ID NOs: 1-259 and 795-1346. In some cases, the first fusion partner is inserted at amino acid 1022 of amino acids 910-1099 of the amino acid sequence of the S. pyogenes Cas9 amino acid sequence set forth in SEQ ID NO: 1545, or a corresponding segment of a Cas9 polypeptide amino acid sequence set forth in any of SEQ ID NOs: 1-259 and 795-1346. In some cases, the first fusion partner is inserted at amino acid 1023 of amino acids 910-1099 of the amino acid sequence of the S. pyogenes Cas9 amino acid sequence set forth in SEQ ID NO: 1545, or a corresponding segment of a Cas9 polypeptide amino acid sequence set forth in any of SEQ ID NOs: 1-259 and 795-1346. In some cases, the first fusion partner is inserted at amino acid 1024 of amino acids 910-1099 of the amino acid sequence of the S. pyogenes Cas9 amino acid sequence set forth in SEQ ID NO: 1545, or a corresponding segment of a Cas9 polypeptide amino acid sequence set forth in any of SEQ ID NOs: 1-259 and 795-1346. In some cases, the first fusion partner is inserted at amino acid 1025 of amino acids 910-1099 of the amino acid sequence of the S. pyogenes Cas9 amino acid sequence set forth in SEQ ID NO: 1545, or a corresponding segment of a Cas9 polypeptide amino acid sequence set forth in any of SEQ ID NOs: 1-259 and 795-1346.

[0100] As one non-limiting example, the first fusion polypeptide can comprise, in order from N-terminus to C-terminus: i) a RuvCI polypeptide; ii) a RuvCII polypeptide; iii) an HNH polypeptide; iv) an N-terminal portion of a RuvCIII polypeptide; v) a first fusion partner; vi) a C-terminal portion of a RuvCIII polypeptide; and v) a PAM-interacting polypeptide.

[0101] An N-terminal portion of a RuvCIII polypeptide can comprise an amino acid sequence having at least 75%, at least 80%, at least 85%, at least 90%, at least 95%, at least 98%, at least 99%, or 100%, amino acid sequence identity to a contiguous stretch of from 80 amino acids to 106 amino acids of amino acids 910 to 1015 of the S. pyogenes Cas9 amino acid sequence set forth in SEQ ID NO: 1545, or a corresponding segment of a Cas9 polypeptide amino acid sequence set forth in any of SEQ ID NOs: 1-259 and 795-1346; and can have a length of from 80 amino acids to 120 amino acids, from 80 amino acids to 90 amino acids, from 90 amino acids to 100 amino acids, from 100 amino acids to 110 amino acids, or from 110 amino acids to 120 amino acids. In some cases, a RuvCIII polypeptide comprises an amino acid sequence having at least 75%, at least 80%, at least 85%, at least 90%, at least 95%, at least 98%, at least 99%, or 100%, amino acid sequence identity to amino acids 910 to 1015 of the S. pyogenes Cas9 amino acid sequence set forth in SEQ ID NO: 1545, or a corresponding segment of a Cas9 polypeptide amino acid sequence set forth in any of SEQ ID NOs: 1-259 and 795-1346; and has a length of from 100 amino acids to 106 amino acids (e.g., 100, 101, 102, 103, 104, 105, 106, 107, 108, 109, or 110 amino acids).

[0102] A C-terminal portion of a RuvCIII polypeptide can comprise an amino acid sequence having at least 75%, at least 80%, at least 85%, at least 90%, at least 95%, at least 98%, at least 99%, or 100%, amino acid sequence identity to a contiguous stretch of from 75 amino acids to 84 amino acids of amino acids 1016 to 1099 of the S. pyogenes Cas9 amino acid sequence set forth in SEQ ID NO: 1545, or a corresponding segment of a Cas9 polypeptide amino acid sequence set forth in any of SEQ ID NOs: 1-259 and 795-1346; and can have a length of from 70 amino acids to 100 amino acids, from 70 amino acids to 80 amino acids, from 80 amino acids to 90 amino acids, or from 90 amino acids to 100 amino acids. In some cases, a C-terminal RuvCIII polypeptide comprises an amino acid sequence having at least 75%, at least 80%, at least 85%, at least 90%, at least 95%, at least 98%, at least 99%, or 100%, amino acid sequence identity to amino acids 1016 to 1099 of the S. pyogenes Cas9 amino acid sequence set forth in SEQ ID NO: 1545, or a corresponding segment of a Cas9 polypeptide amino acid sequence set forth in any of SEQ ID NOs: 1-259 and 795-1346; and has a length of from 80 amino acids to 90 amino acids (e.g., 80, 81, 82, 83, 84, 85, 86, 87, 88, 89, or 90 amino acids).

[0103] For example, in some cases, the first fusion polypeptide comprises, in order from N-terminus to C-terminus: i) a RuvCI polypeptide; ii) a RuvCII polypeptide; iii) an HNH polypeptide; iv) an N-terminal portion of a RuvCIII polypeptide, comprising an amino acid sequence having at least 75%, at least 80%, at least 85%, at least 90%, at least 95%, at least 98%, at least 99%, or 100%, amino acid sequence identity to amino acids 910 to 1010 of the S. pyogenes Cas9 amino acid sequence set forth in SEQ ID NO: 1545, or a corresponding segment of a Cas9 polypeptide amino acid sequence set forth in any of SEQ ID NOs: 1-259 and 795-1346; v) a first fusion partner; vi) a C-terminal portion of a RuvCIII polypeptide comprising an amino acid sequence having at least 75%, at least 80%, at least 85%, at least 90%, at least 95%, at least 98%, at least 99%, or 100%, amino acid sequence identity to amino acids 1011-1099 of the S. pyogenes Cas9 amino acid sequence set forth in SEQ ID NO: 1545, or a corresponding segment of a Cas9 polypeptide amino acid sequence set forth in any of SEQ ID NOs: 1-259 and 795-1346; and vii) a PAM-interacting polypeptide.

[0104] As another example, in some cases, the first fusion polypeptide comprises, in order from N-terminus to C-terminus: i) a RuvCI polypeptide; ii) a RuvCII polypeptide; iii) an HNH polypeptide; iv) an N-terminal portion of a RuvCIII polypeptide, comprising an amino acid sequence having at least 75%, at least 80%, at least 85%, at least 90%, at least 95%, at least 98%, at least 99%, or 100%, amino acid sequence identity to amino acids 910 to 1011 of the S. pyogenes Cas9 amino acid sequence set forth in SEQ ID NO: 1545, or a corresponding segment of a Cas9 polypeptide amino acid sequence set forth in any of SEQ ID NOs: 1-259 and 795-1346; v) a first fusion partner; vi) a C-terminal portion of a RuvCIII polypeptide comprising an amino acid sequence having at least 75%, at least 80%, at least 85%, at least 90%, at least 95%, at least 98%, at least 99%, or 100%, amino acid sequence identity to amino acids 1012-1099 of the S. pyogenes Cas9 amino acid sequence set forth in SEQ ID NO: 1545, or a corresponding segment of a Cas9 polypeptide amino acid sequence set forth in any of SEQ ID NOs: 1-259 and 795-1346; and vii) a PAM-interacting polypeptide.

[0105] As another example, in some cases, the first fusion polypeptide comprises, in order from N-terminus to C-terminus: i) a RuvCI polypeptide; ii) a RuvCII polypeptide; iii) an HNH polypeptide; iv) an N-terminal portion of a RuvCIII polypeptide, comprising an amino acid sequence having at least 75%, at least 80%, at least 85%, at least 90%, at least 95%, at least 98%, at least 99%, or 100%, amino acid sequence identity to amino acids 910 to 1012 of the S. pyogenes Cas9 amino acid sequence set forth in SEQ ID NO: 1545, or a corresponding segment of a Cas9 polypeptide amino acid sequence set forth in any of SEQ ID NOs: 1-259 and 795-1346; v) a first fusion partner; vi) a C-terminal portion of a RuvCIII polypeptide comprising an amino acid sequence having at least 75%, at least 80%, at least 85%, at least 90%, at least 95%, at least 98%, at least 99%, or 100%, amino acid sequence identity to amino acids 1013-1099 of the S. pyogenes Cas9 amino acid sequence set forth in SEQ ID NO: 1545, or a corresponding segment of a Cas9 polypeptide amino acid sequence set forth in any of SEQ ID NOs: 1-259 and 795-1346; and vii) a PAM-interacting polypeptide.

[0106] As another example, in some cases, the first fusion polypeptide comprises, in order from N-terminus to C-terminus: i) a RuvCI polypeptide; ii) a RuvCII polypeptide; iii) an HNH polypeptide; iv) an N-terminal portion of a RuvCIII polypeptide, comprising an amino acid sequence having at least 75%, at least 80%, at least 85%, at least 90%, at least 95%, at least 98%, at least 99%, or 100%, amino acid sequence identity to amino acids 910 to 1013 of the S. pyogenes Cas9 amino acid sequence set forth in SEQ ID NO: 1545, or a corresponding segment of a Cas9 polypeptide amino acid sequence set forth in any of SEQ ID NOs: 1-259 and 795-1346; v) a first fusion partner; vi) a C-terminal portion of a RuvCIII polypeptide comprising an amino acid sequence having at least 75%, at least 80%, at least 85%, at least 90%, at least 95%, at least 98%, at least 99%, or 100%, amino acid sequence identity to amino acids 1014-1099 of the S. pyogenes Cas9 amino acid sequence set forth in SEQ ID NO: 1545, or a corresponding segment of a Cas9 polypeptide amino acid sequence set forth in any of SEQ ID NOs: 1-259 and 795-1346; and vii) a PAM-interacting polypeptide.

[0107] As another example, in some cases, the first fusion polypeptide comprises, in order from N-terminus to C-terminus: i) a RuvCI polypeptide; ii) a RuvCII polypeptide; iii) an HNH polypeptide; iv) an N-terminal portion of a RuvCIII polypeptide, comprising an amino acid sequence having at least 75%, at least 80%, at least 85%, at least 90%, at least 95%, at least 98%, at least 99%, or 100%, amino acid sequence identity to amino acids 910 to 1014 of the S. pyogenes Cas9 amino acid sequence set forth in SEQ ID NO: 1545, or a corresponding segment of a Cas9 polypeptide amino acid sequence set forth in any of SEQ ID NOs: 1-259 and 795-1346; v) a first fusion partner; vi) a C-terminal portion of a RuvCIII polypeptide comprising an amino acid sequence having at least 75%, at least 80%, at least 85%, at least 90%, at least 95%, at least 98%, at least 99%, or 100%, amino acid sequence identity to amino acids 1015-1099 of the S. pyogenes Cas9 amino acid sequence set forth in SEQ ID NO: 1545, or a corresponding segment of a Cas9 polypeptide amino acid sequence set forth in any of SEQ ID NOs: 1-259 and 795-1346; and vii) a PAM-interacting polypeptide.

[0108] As another example, in some cases, the first fusion polypeptide comprises, in order from N-terminus to C-terminus: i) a RuvCI polypeptide; ii) a RuvCII polypeptide; iii) an HNH polypeptide; iv) an N-terminal portion of a RuvCIII polypeptide, comprising an amino acid sequence having at least 75%, at least 80%, at least 85%, at least 90%, at least 95%, at least 98%, at least 99%, or 100%, amino acid sequence identity to amino acids 910 to 1015 of the S. pyogenes Cas9 amino acid sequence set forth in SEQ ID NO: 1545, or a corresponding segment of a Cas9 polypeptide amino acid sequence set forth in any of SEQ ID NOs: 1-259 and 795-1346; v) a first fusion partner; vi) a C-terminal portion of a RuvCIII polypeptide comprising an amino acid sequence having at least 75%, at least 80%, at least 85%, at least 90%, at least 95%, at least 98%, at least 99%, or 100%, amino acid sequence identity to amino acids 1016-1099 of the S. pyogenes Cas9 amino acid sequence set forth in SEQ ID NO: 1545, or a corresponding segment of a Cas9 polypeptide amino acid sequence set forth in any of SEQ ID NOs: 1-259 and 795-1346; and vii) a PAM-interacting polypeptide.

[0109] As another example, in some cases, the first fusion polypeptide comprises, in order from N-terminus to C-terminus: i) a RuvCI polypeptide; ii) a RuvCII polypeptide; iii) an HNH polypeptide; iv) an N-terminal portion of a RuvCIII polypeptide, comprising an amino acid sequence having at least 75%, at least 80%, at least 85%, at least 90%, at least 95%, at least 98%, at least 99%, or 100%, amino acid sequence identity to amino acids 910 to 1016 of the S. pyogenes Cas9 amino acid sequence set forth in SEQ ID NO: 1545, or a corresponding segment of a Cas9 polypeptide amino acid sequence set forth in any of SEQ ID NOs: 1-259 and 795-1346; v) a first fusion partner; vi) a C-terminal portion of a RuvCIII polypeptide comprising an amino acid sequence having at least 75%, at least 80%, at least 85%, at least 90%, at least 95%, at least 98%, at least 99%, or 100%, amino acid sequence identity to amino acids 1017-1099 of the S. pyogenes Cas9 amino acid sequence set forth in SEQ ID NO: 1545, or a corresponding segment of a Cas9 polypeptide amino acid sequence set forth in any of SEQ ID NOs: 1-259 and 795-1346; and vii) a PAM-interacting polypeptide.

[0110] As another example, in some cases, the first fusion polypeptide comprises, in order from N-terminus to C-terminus: i) a RuvCI polypeptide; ii) a RuvCII polypeptide; iii) an HNH polypeptide; iv) an N-terminal portion of a RuvCIII polypeptide, comprising an amino acid sequence having at least 75%, at least 80%, at least 85%, at least 90%, at least 95%, at least 98%, at least 99%, or 100%, amino acid sequence identity to amino acids 910 to 1017 of the S. pyogenes Cas9 amino acid sequence set forth in SEQ ID NO: 1545, or a corresponding segment of a Cas9 polypeptide amino acid sequence set forth in any of SEQ ID NOs: 1-259 and 795-1346; v) a first fusion partner; vi) a C-terminal portion of a RuvCIII polypeptide comprising an amino acid sequence having at least 75%, at least 80%, at least 85%, at least 90%, at least 95%, at least 98%, at least 99%, or 100%, amino acid sequence identity to amino acids 1018-1099 of the S. pyogenes Cas9 amino acid sequence set forth in SEQ ID NO: 1545, or a corresponding segment of a Cas9 polypeptide amino acid sequence set forth in any of SEQ ID NOs: 1-259 and 795-1346; and vii) a PAM-interacting polypeptide.

[0111] As another example, in some cases, the first fusion polypeptide comprises, in order from N-terminus to C-terminus: i) a RuvCI polypeptide; ii) a RuvCII polypeptide; iii) an HNH polypeptide; iv) an N-terminal portion of a RuvCIII polypeptide, comprising an amino acid sequence having at least 75%, at least 80%, at least 85%, at least 90%, at least 95%, at least 98%, at least 99%, or 100%, amino acid sequence identity to amino acids 910 to 1018 of the S. pyogenes Cas9 amino acid sequence set forth in SEQ ID NO: 1545, or a corresponding segment of a Cas9 polypeptide amino acid sequence set forth in any of SEQ ID NOs: 1-259 and 795-1346; v) a first fusion partner; vi) a C-terminal portion of a RuvCIII polypeptide comprising an amino acid sequence having at least 75%, at least 80%, at least 85%, at least 90%, at least 95%, at least 98%, at least 99%, or 100%, amino acid sequence identity to amino acids 1019-1099 of the S. pyogenes Cas9 amino acid sequence set forth in SEQ ID NO: 1545, or a corresponding segment of a Cas9 polypeptide amino acid sequence set forth in any of SEQ ID NOs: 1-259 and 795-1346; and vii) a PAM-interacting polypeptide.

[0112] As another example, in some cases, the first fusion polypeptide comprises, in order from N-terminus to C-terminus: i) a RuvCI polypeptide; ii) a RuvCII polypeptide; iii) an HNH polypeptide; iv) an N-terminal portion of a RuvCIII polypeptide, comprising an amino acid sequence having at least 75%, at least 80%, at least 85%, at least 90%, at least 95%, at least 98%, at least 99%, or 100%, amino acid sequence identity to amino acids 910 to 1019 of the S. pyogenes Cas9 amino acid sequence set forth in SEQ ID NO: 1545, or a corresponding segment of a Cas9 polypeptide amino acid sequence set forth in any of SEQ ID NOs: 1-259 and 795-1346; v) a first fusion partner; vi) a C-terminal portion of a RuvCIII polypeptide comprising an amino acid sequence having at least 75%, at least 80%, at least 85%, at least 90%, at least 95%, at least 98%, at least 99%, or 100%, amino acid sequence identity to amino acids 1020-1099 of the S. pyogenes Cas9 amino acid sequence set forth in SEQ ID NO: 1545, or a corresponding segment of a Cas9 polypeptide amino acid sequence set forth in any of SEQ ID NOs: 1-259 and 795-1346; and vii) a PAM-interacting polypeptide.

[0113] As another example, in some cases, the first fusion polypeptide comprises, in order from N-terminus to C-terminus: i) a RuvCI polypeptide; ii) a RuvCII polypeptide; iii) an HNH polypeptide; iv) an N-terminal portion of a RuvCIII polypeptide, comprising an amino acid sequence having at least 75%, at least 80%, at least 85%, at least 90%, at least 95%, at least 98%, at least 99%, or 100%, amino acid sequence identity to amino acids 910 to 1020 of the S. pyogenes Cas9 amino acid sequence set forth in SEQ ID NO: 1545, or a corresponding segment of a Cas9 polypeptide amino acid sequence set forth in any of SEQ ID NOs: 1-259 and 795-1346; v) a first fusion partner; vi) a C-terminal portion of a RuvCIII polypeptide comprising an amino acid sequence having at least 75%, at least 80%, at least 85%, at least 90%, at least 95%, at least 98%, at least 99%, or 100%, amino acid sequence identity to amino acids 1021-1099 of the S. pyogenes Cas9 amino acid sequence set forth in SEQ ID NO: 1545, or a corresponding segment of a Cas9 polypeptide amino acid sequence set forth in any of SEQ ID NOs: 1-259 and 795-1346; and vii) a PAM-interacting polypeptide.

[0114] As another example, in some cases, the first fusion polypeptide comprises, in order from N-terminus to C-terminus: i) a RuvCI polypeptide; ii) a RuvCII polypeptide; iii) an HNH polypeptide; iv) an N-terminal portion of a RuvCIII polypeptide, comprising an amino acid sequence having at least 75%, at least 80%, at least 85%, at least 90%, at least 95%, at least 98%, at least 99%, or 100%, amino acid sequence identity to amino acids 910 to 1021 of the S. pyogenes Cas9 amino acid sequence set forth in SEQ ID NO: 1545, or a corresponding segment of a Cas9 polypeptide amino acid sequence set forth in any of SEQ ID NOs: 1-259 and 795-1346; v) a first fusion partner; vi) a C-terminal portion of a RuvCIII polypeptide comprising an amino acid sequence having at least 75%, at least 80%, at least 85%, at least 90%, at least 95%, at least 98%, at least 99%, or 100%, amino acid sequence identity to amino acids 1022-1099 of the S. pyogenes Cas9 amino acid sequence set forth in SEQ ID NO: 1545, or a corresponding segment of a Cas9 polypeptide amino acid sequence set forth in any of SEQ ID NOs: 1-259 and 795-1346; and vii) a PAM-interacting polypeptide.

[0115] As another example, in some cases, the first fusion polypeptide comprises, in order from N-terminus to C-terminus: i) a RuvCI polypeptide; ii) a RuvCII polypeptide; iii) an HNH polypeptide; iv) an N-terminal portion of a RuvCIII polypeptide, comprising an amino acid sequence having at least 75%, at least 80%, at least 85%, at least 90%, at least 95%, at least 98%, at least 99%, or 100%, amino acid sequence identity to amino acids 910 to 1022 of the S. pyogenes Cas9 amino acid sequence set forth in SEQ ID NO: 1545, or a corresponding segment of a Cas9 polypeptide amino acid sequence set forth in any of SEQ ID NOs: 1-259 and 795-1346; v) a first fusion partner; vi) a C-terminal portion of a RuvCIII polypeptide comprising an amino acid sequence having at least 75%, at least 80%, at least 85%, at least 90%, at least 95%, at least 98%, at least 99%, or 100%, amino acid sequence identity to amino acids 1023-1099 of the S. pyogenes Cas9 amino acid sequence set forth in SEQ ID NO: 1545, or a corresponding segment of a Cas9 polypeptide amino acid sequence set forth in any of SEQ ID NOs: 1-259 and 795-1346; and vii) a PAM-interacting polypeptide.

[0116] As another example, in some cases, the first fusion polypeptide comprises, in order from N-terminus to C-terminus: i) a RuvCI polypeptide; ii) a RuvCII polypeptide; iii) an HNH polypeptide; iv) an N-terminal portion of a RuvCIII polypeptide, comprising an amino acid sequence having at least 75%, at least 80%, at least 85%, at least 90%, at least 95%, at least 98%, at least 99%, or 100%, amino acid sequence identity to amino acids 910 to 1023 of the S. pyogenes Cas9 amino acid sequence set forth in SEQ ID NO: 1545, or a corresponding segment of a Cas9 polypeptide amino acid sequence set forth in any of SEQ ID NOs: 1-259 and 795-1346; v) a first fusion partner; vi) a C-terminal portion of a RuvCIII polypeptide comprising an amino acid sequence having at least 75%, at least 80%, at least 85%, at least 90%, at least 95%, at least 98%, at least 99%, or 100%, amino acid sequence identity to amino acids 1024-1099 of the S. pyogenes Cas9 amino acid sequence set forth in SEQ ID NO: 1545, or a corresponding segment of a Cas9 polypeptide amino acid sequence set forth in any of SEQ ID NOs: 1-259 and 795-1346; and vii) a PAM-interacting polypeptide.

[0117] As another example, in some cases, the first fusion polypeptide comprises, in order from N-terminus to C-terminus: i) a RuvCI polypeptide; ii) a RuvCII polypeptide; iii) an HNH polypeptide; iv) an N-terminal portion of a RuvCIII polypeptide, comprising an amino acid sequence having at least 75%, at least 80%, at least 85%, at least 90%, at least 95%, at least 98%, at least 99%, or 100%, amino acid sequence identity to amino acids 910 to 1024 of the S. pyogenes Cas9 amino acid sequence set forth in SEQ ID NO: 1545, or a corresponding segment of a Cas9 polypeptide amino acid sequence set forth in any of SEQ ID NOs: 1-259 and 795-1346; v) a first fusion partner; vi) a C-terminal portion of a RuvCIII polypeptide comprising an amino acid sequence having at least 75%, at least 80%, at least 85%, at least 90%, at least 95%, at least 98%, at least 99%, or 100%, amino acid sequence identity to amino acids 1025-1099 of the S. pyogenes Cas9 amino acid sequence set forth in SEQ ID NO: 1545, or a corresponding segment of a Cas9 polypeptide amino acid sequence set forth in any of SEQ ID NOs: 1-259 and 795-1346; and vii) a PAM-interacting polypeptide.

[0118] Second Fusion Polypeptide

[0119] In some cases, the second polypeptide of a Cas9 heterodimer of the present disclosure comprises an α-helical lobe (also referred to as “an alpha-helical recognition region”) of a Cas9 polypeptide. For example, in some cases, the second polypeptide comprises an amino acid sequence having at least 75%, at least 80%, at least 85%, at least 90%, at least 95%, at least 98%, at least 99%, or 100%, amino acid sequence identity to a contiguous stretch of from 400 amino acids to 658 amino acids of amino acids 61 to 718 of the S. pyogenes Cas9 amino acid sequence set forth in SEQ ID NO: 1545, or a corresponding segment of a Cas9 polypeptide amino acid sequence set forth in any of SEQ ID NOs: 1-259 and 795-1346; and can have a length of from 400 amino acids to 800 amino acids, e.g., from 400 amino acids to 450 amino acids, from 450 amino acids to 500 amino acids, from 500 amino acids to 550 amino acids, from 550 amino acids to 600 amino acids, from 600 amino acids to 650 amino acids, from 650 amino acids to 700 amino acids, from 700 amino acids to 750 amino acids, or from 750 amino acids to 800 amino acids. In some cases, the second polypeptide comprises an amino acid sequence having at least 75%, at least 80%, at least 85%, at least 90%, at least 95%, at least 98%, at least 99%, or 100%, amino acid sequence identity to amino acids 61-718 of the S. pyogenes Cas9 amino acid sequence set forth in SEQ ID NO: 1545, or a corresponding segment of a Cas9 polypeptide amino acid sequence set forth in any of SEQ ID NOs: 1-259 and 795-1346; and has a length of from 650 amino acids to 660 amino acids (e.g., 650, 651, 652, 653, 654, 655, 656, 657, 658, 659, or 660 amino acids).

[0120] In some cases, the second polypeptide comprises an amino acid sequence having at least 75%, at least 80%, at least 85%, at least 90%, at least 95%, at least 98%, at least 99%, or 100%, amino acid sequence identity to a contiguous stretch of from 400 amino acids to 624 amino acids of amino acids 95 to 718 of the S. pyogenes Cas9 amino acid sequence set forth in SEQ ID NO: 1545, or a corresponding segment of a Cas9 polypeptide amino acid sequence set forth in any of SEQ ID NOs: 1-259 and 795-1346; and has a length of from about 400 amino acids to 800 amino acids, e.g., from 400 amino acids to 450 amino acids, from 450 amino acids to 500 amino acids, from 500 amino acids to 550 amino acids, from 550 amino acids to 600 amino acids, from 600 amino acids to 650 amino acids, from 650 amino acids to 700 amino acids, from 700 amino acids to 750 amino acids, or from 750 amino acids to 800 amino acids. In some cases, the second polypeptide comprises an amino acid sequence having at least 75%, at least 80%, at least 85%, at least 90%, at least 95%, at least 98%, at least 99%, or 100%, amino acid sequence identity to amino acids 95 to 718 of the S. pyogenes Cas9 amino acid sequence set forth in SEQ ID NO: 1545, or a corresponding segment of a Cas9 polypeptide amino acid sequence set forth in any of SEQ ID NOs: 1-259 and 795-1346; and has a length of from 620 amino acids to 630 amino acids (e.g., 620, 621, 622, 623, 624, 625, 626, 627, 628, 629, or 630 amino acids).

[0121] In some cases, G56 (of the S. pyogenes sequence set forth in SEQ ID NO: 1545) can be selected as the N-terminus for the alpha-helical lobe (e.g., due to its location in a poorly-conserved linker just before the arginine-rich bridge helix, which has been shown to be critical for Cas9 cleavage activity in human cells). In some cases, the second polypeptide of a Cas9 heterodimer of the present disclosure comprises an α-helical lobe (also referred to as “an alpha-helical recognition region”) of a Cas9 polypeptide. For example, in some cases, the second polypeptide comprises an amino acid sequence having at least 75%, at least 80%, at least 85%, at least 90%, at least 95%, at least 98%, at least 99%, or 100%, amino acid sequence identity to a contiguous stretch of from 400 amino acids to 658 amino acids of amino acids 56 to 714 of the S. pyogenes Cas9 amino acid sequence set forth in SEQ ID NO: 1545, or a corresponding segment of a Cas9 polypeptide amino acid sequence set forth in any of SEQ ID NOs: 1-259 and 795-1346; and can have a length of from 400 amino acids to 800 amino acids, e.g., from 400 amino acids to 450 amino acids, from 450 amino acids to 500 amino acids, from 500 amino acids to 550 amino acids, from 550 amino acids to 600 amino acids, from 600 amino acids to 650 amino acids, from 650 amino acids to 700 amino acids, from 700 amino acids to 750 amino acids, or from 750 amino acids to 800 amino acids. In some cases, the second polypeptide comprises an amino acid sequence having at least 75%, at least 80%, at least 85%, at least 90%, at least 95%, at least 98%, at least 99%, or 100%, amino acid sequence identity to amino acids 56-714 of the S. pyogenes Cas9 amino acid sequence set forth in SEQ ID NO: 1545, or a corresponding segment of a Cas9 polypeptide amino acid sequence set forth in any of SEQ ID NOs: 1-259 and 795-1346; and has a length of from 650 amino acids to 660 amino acids (e.g., 650, 651, 652, 653, 654, 655, 656, 657, 658, 659, or 660 amino acids).

[0122] In some cases, the C-terminus of the alpha-helical lobe can be at the beginning, end, or within the linker between the two lobes of the WT Cas9 protein. For example, the C-terminus of the alpha-helical lobe can be at or near 5714 of the WT Cas9 protein set forth in SEQ I D NO: 1545. For example, the C-terminus of the alpha-helical lobe can be 5714 of the WT Cas9 protein set forth in SEQ I D NO: 1545.

[0123] In some cases, the second fusion polypeptide comprises, in order from N-terminus to C-terminus: a) a second fusion partner; and b) a second polypeptide that comprises an alpha-helical recognition region. In some cases, the second fusion polypeptide comprises, in order from N-terminus to C-terminus: a) a second polypeptide that comprises an alpha-helical recognition region; and b) a second fusion partner.

[0124] In some cases, the second fusion polypeptide comprises a heterologous sequence that provides for subcellular localization (e.g., an NLS for targeting to the nucleus; a mitochondrial localization signal for targeting to the mitochondria; a chloroplast localization signal for targeting to a chloroplast; an ER retention signal; and the like). In some cases, the second fusion polypeptide includes 2 or more, 3 or more, 4 or more, or 5 or more NLSs. In some cases, an NLS is located at or near (e.g., within 75 amino acids, 50 amino acids, or 30 amino acids) the N-terminus and/or at or near (e.g., within 75 amino acids, 50 amino acids, or 30 amino acids) the C-terminus.

[0125] In some cases, the second fusion polypeptide comprises an NLS. For example, in some cases, the second fusion polypeptide comprises, in order from N-terminus to C-terminus: a) an NLS; b) a second fusion partner; and c) a second polypeptide that comprises an alpha-helical recognition region. In some cases, the second fusion polypeptide comprises, in order from N-terminus to C-terminus: a) an NLS; b) a second fusion partner; c) a second polypeptide that comprises an alpha-helical recognition region; and d) an NLS. In some cases, the second fusion polypeptide comprises, in order from N-terminus to C-terminus: a) an NLS; b) a second polypeptide that comprises an alpha-helical recognition region; and c) a second fusion partner. In some cases, the second fusion polypeptide comprises, in order from N-terminus to C-terminus: a) an NLS; b) a second polypeptide that comprises an alpha-helical recognition region; c) a second fusion partner; and d) an NLS. In some cases, the NLS comprises the amino acid sequence MAPKKKRKVGIHGVPAA (SEQ ID NO: 1546). In some cases, the NLS comprises the amino acid sequence KRPAATKKAGQAKKKK (SEQ ID NO: 1547). Other suitable NLS are described elsewhere herein.

[0126] An NLS can be at or near the N-terminus and/or the C-terminus. In some cases, the second fusion polypeptide comprises two or more NLSs (e.g., 3 or more, 4 or more, or 5 or more NLSs). In some cases, the second fusion polypeptide comprises one or more NLSs (e.g., 2 or more, 3 or more, or 4 or more NLSs) at or near the N-terminus and/or one or more NLSs (e.g., 2 or more, 3 or more, or 4 or more NLSs) at or near the C-terminus. The term “at or near” is used here because, as is known in the art, the NLS need not be at the actual terminus of a protein, but can be positioned near (e.g., within 100 amino acids of) an N- and/or C-terminus (e.g., within 80, within 75, within 60, within 55, within 50, within 45, within 40, within 35, or within 30 amino acids of the an N-and/or C-terminus).

[0127] In some cases, the second fusion polypeptide comprises one or more linker polypeptides. For example, a linker polypeptide can be interposed between any of: a) an NLS and a fusion partner; b) a fusion partner and an alpha-helical lobe; and c) an alpha-helical lobe and an NLS. Suitable linker polypeptides are described elsewhere herein.

[0128] Cas9 Heterodimer Comprising a Circularly Permuted Polypeptide

[0129] In some embodiments, the Cas9 nuclease lobe of a Cas9 heterodimer of the present disclosure is a circular permutant. As used herein, the term “circular permutant” refers to a variant polypeptide (e.g., of a subject Cas9 heterodimer) in which one section of the primary amino acid sequence has been moved to a different position within the primary amino acid sequence of the polypeptide, but where the local order of amino acids has not been changed, and where the three dimensional architecture of the protein is conserved. For example, a circular permutant of a wild type 500 amino acid polypeptide may have an N-terminal residue of residue number 50 (relative to the wild type protein), where residues 1-49 of the wild type protein are added the C-terminus. Such a circular permutant, relative to the wild type protein sequence would have, from N-terminus to C-terminus, amino acid numbers 50-500 followed by 1-49 (amino acid 49 would be the C-terminal residue). Thus, such an example circular permutant would have the same total number of amino acids as the wild type reference protein, and the amino acids would even be in the same order (locally), but the overall primary amino acid sequence is changed.

[0130] In some embodiments, a Cas9 heterodimer of the present disclosure comprises: a) a first, circularly permuted, polypeptide comprising: a RuvCI polypeptide; ii) a RuvCII polypeptide; iii) an HNH polypeptide; iv) a RuvCIII polypeptide; and v) a PAM-interacting polypeptide; where the first polypeptide comprises a first member of a dimerization pair; and b) a second polypeptide comprising an alpha-helical recognition region and a second member of a dimerization pair.

[0131] For example, in some cases, a Cas9 heterodimer of the present disclosure comprises: A) a first fusion polypeptide comprising: a) a first, circular permuted, polypeptide that comprises: i) a RuvCI polypeptide; ii) a RuvCII polypeptide; iii) an HNH polypeptide; iv) a RuvCIII polypeptide; and v) a PAM-interacting polypeptide; and b) a first fusion partner, where the first fusion partner is a first member of a dimerization pair; and B) a second fusion polypeptide comprising: a) a second polypeptide that comprises an alpha-helical recognition region; and b) a second fusion partner, where the second fusion partner is a second member of the dimerization pair.

[0132] First Fusion Polypeptide

[0133] As described above, a Cas9 heterodimer of the present disclosure comprises: A) a first fusion polypeptide comprising: a) a first, circular permuted, polypeptide that comprises: i) a RuvCI polypeptide; ii) a RuvCII polypeptide; iii) an HNH polypeptide; iv) a RuvCIII polypeptide; and v) a PAM-interacting polypeptide; and b) a first fusion partner, where the first fusion partner is a first member of a dimerization pair; and B) a second fusion polypeptide comprising: a) a second polypeptide that comprises an alpha-helical recognition region; and b) a second fusion partner, where the second fusion partner is a second member of the dimerization pair. In some cases, the first fusion partner (first member of the dimerization pair) is covalently linked, directly or via a linker, at or near (e.g., within 1 to 50 amino acids of) the amino terminus (N-terminus) of the first, circular permuted, polypeptide. In some cases, the first member of the dimerization pair is covalently linked, directly or via a linker, at or near (e.g., within 1 to 50 amino acids of) the carboxyl terminus (C-terminus) of the first, circular permuted, polypeptide. In some cases, the first polypeptide comprises a nuclease lobe of a Cas9 polypeptide.

[0134] In some cases, a first fusion polypeptide comprises one or more linker polypeptides. A linker polypeptide can be interposed between any of the various possible components (polypeptides) of a first fusion polypeptide. Examples of suitable positions for a linker polypeptide include, but are not limited to, interposed between: a) an NLS and a fusion partner; b) a fusion partner and a RuvCII polypeptide; c) a PAM-interacting polypeptide and a RuvCI polypeptide; d) a RuvCI polypeptide and an NLS; e) a RuvCI polypeptide and a fusion partner; and f) a RuvCI polypeptide and a RuvCII polypeptide.

[0135] The linker polypeptide may have any of a variety of amino acid sequences. Proteins can be joined by a spacer peptide, generally of a flexible nature, although other chemical linkages are not excluded. Currently, it is contemplated that the most useful linker sequences will generally be peptides of between about 6 and about 40 amino acids in length, or between about 6 and about 25 amino acids in length. These linkers are generally produced by using synthetic, linker-encoding oligonucleotides to couple the proteins. Peptide linkers with a degree of flexibility will generally be preferred. The linking peptides may have virtually any amino acid sequence, bearing in mind that the preferred linkers will have a sequence that results in a generally flexible peptide. The use of small amino acids, such as glycine and alanine, are of use in creating a flexible peptide. The creation of such sequences is routine to those of skill in the art. A variety of different linkers are commercially available and are considered suitable for use.

[0136] Exemplary polypeptide linkers include glycine polymers (G)ₙ, glycine-serine polymers (including, for example, (GS)ₙ, GSGGSₙ (SEQ ID NO: 1548) and GGGSₙ (SEQ ID NO: 1549), where n is an integer of at least one), glycine-alanine polymers, alanine-serine polymers. Exemplary linkers can comprise amino acid sequences including, but not limited to, GGSG (SEQ ID NO: 1550), GGSGG (SEQ ID NO: 1551), GSGSG (SEQ ID NO: 1552), GSGGG (SEQ ID NO: 1553), GGGSG (SEQ ID NO: 1554), GSSSG (SEQ ID NO: 1555), and the like. The ordinarily skilled artisan will recognize that design of a peptide conjugated to any elements described above can include linkers that are all or partially flexible, such that the linker can include a flexible linker as well as one or more portions that confer less flexible structure.

[0137] Cas9 Nuclease Lobe Circular Permutant 1

[0138] In some cases, the first fusion polypeptide comprises, in order from N-terminus to C-terminus: a) a first fusion partner; and b) a first polypeptide comprising: i) a RuvCII polypeptide; ii) an HNH polypeptide; iii) a RuvCIII polypeptide; iv) a PAM-interacting polypeptide; and v) a RuvCI polypeptide. In some cases, the first fusion polypeptide comprises, in order from N-terminus to C-terminus: a) a first polypeptide comprising: i) a RuvCII polypeptide; ii) an HNH polypeptide; iii) a RuvCIII polypeptide; iv) a PAM-interacting polypeptide; and v) a RuvCI polypeptide; and b) a first fusion partner. In some cases, the first fusion partner is a first member of a dimerization pair. Suitable first members of a dimerization pair are described herein.

[0139] In some cases, the first fusion polypeptide comprises a heterologous sequence that provides for subcellular localization (e.g., a nuclear localization signal (NLS) for targeting to the nucleus; a mitochondrial localization signal for targeting to the mitochondria; a chloroplast localization signal for targeting to a chloroplast; an ER retention signal; and the like). In some cases, the first fusion polypeptide includes 2 or more, 3 or more, 4 or more, or 5 or more NLSs. In some cases, an NLS is located at or near (e.g., within 75 amino acids, 50 amino acids, or 30 amino acids) the N-terminus and/or at or near (e.g., within 75 amino acids, 50 amino acids, or 30 amino acids) the C-terminus. In some cases, the first fusion polypeptide comprises a nuclear localization signal (NLS). For example, in some cases, the first fusion polypeptide comprises, in order from N-terminus to C-terminus: a) an NLS; b) a first fusion partner; and c) a first polypeptide comprising: i) a RuvCII polypeptide; ii) an HNH polypeptide; iii) a RuvCIII polypeptide; iv) a PAM-interacting polypeptide; and v) a RuvCI polypeptide. In some cases, the first fusion polypeptide comprises, in order from N-terminus to C-terminus: a) an NLS; b) a first fusion partner; c) a first polypeptide comprising: i) a RuvCII polypeptide; ii) an HNH polypeptide; iii) a RuvCIII polypeptide; iv) a PAM-interacting polypeptide; and v) a RuvCI polypeptide; and d) an NLS. In some cases, the first fusion polypeptide comprises, in order from N-terminus to C-terminus: a) an NLS; b) a first polypeptide comprising: i) a RuvCII polypeptide; ii) an HNH polypeptide; iii) a RuvCIII polypeptide; iv) a PAM-interacting polypeptide; and v) a RuvCI polypeptide; and c) a first fusion partner. In some cases, the first fusion polypeptide comprises, in order from N-terminus to C-terminus: a) a first polypeptide comprising: i) a RuvCII polypeptide; ii) an HNH polypeptide; iii) a RuvCIII polypeptide; iv) a PAM-interacting polypeptide; and v) a RuvCI polypeptide; b) a first fusion partner; and c) an NLS. In some cases, the first fusion polypeptide comprises, in order from N-terminus to C-terminus: a) a first fusion partner; b a first polypeptide comprising: i) a RuvCII polypeptide; ii) an HNH polypeptide; iii) a RuvCIII polypeptide; iv) a PAM-interacting polypeptide; and v) a RuvCI polypeptide; and c) an NLS. In some cases, the first fusion partner is a first member of a dimerization pair. In some cases, the NLS comprises the amino acid sequence MAPKKKRKVGIHGVPAA (SEQ ID NO: 1546). In some cases, the NLS comprises the amino acid sequence KRPAATKKAGQAKKKK (SEQ ID NO: 1547). Other suitable NLS are described elsewhere herein.

[0140] An NLS can be at or near the N-terminus and/or the C-terminus. In some cases, the first fusion polypeptide comprises two or more NLSs (e.g., 3 or more, 4 or more, or 5 or more NLSs). In some cases, the first fusion polypeptide comprises one or more NLSs (e.g., 2 or more, 3 or more, or 4 or more NLSs) at or near the N-terminus and/or one or more NLSs (e.g., 2 or more, 3 or more, or 4 or more NLSs) at or near the C-terminus. The term “at or near” is used here because, as is known in the art, the NLS need not be at the actual terminus of a protein, but can be positioned near (e.g., within 100 amino acids of) an N- and/or C-terminus (e.g., within 80, within 75, within 60, within 55, within 50, within 45, within 40, within 35, or within 30 amino acids of the an N-and/or C-terminus).

[0141] A RuvCII polypeptide can comprise an amino acid sequence having at least 75%, at least 80%, at least 85%, at least 90%, at least 95%, at least 98%, at least 99%, or 100%, amino acid sequence identity to a contiguous stretch of from 40 to 57 amino acids of amino acids 718-774 of the S. pyogenes Cas9 amino acid sequence set forth in SEQ ID NO: 1545, or a corresponding segment of a Cas9 polypeptide amino acid sequence set forth in any of SEQ ID NOs: 1-259 and 795-1346; and can have a length of from 40 amino acids to about 70 amino acids, e.g., from 40 amino acids to 45 amino acids, from 45 amino acids to 50 amino acids, from 50 amino acids to 55 amino acids, from 55 amino acids to 60 amino acids, from 60 amino acids to 65 amino acids, or from 65 amino acids to 70 amino acids. In some cases, a RuvCII polypeptide comprises an amino acid sequence having at least 75%, at least 80%, at least 85%, at least 90%, at least 95%, at least 98%, at least 99%, or 100%, amino acid sequence identity to amino acids 718-774 of the S. pyogenes Cas9 amino acid sequence set forth in SEQ ID NO: 1545, or a corresponding segment of a Cas9 polypeptide amino acid sequence set forth in any of SEQ ID NOs: 1-259 and 795-1346; and has a length of 55-60 (e.g., 55, 56, 57, 58, 59, or 60) amino acids.

[0142] A RuvCII polypeptide can comprise an amino acid sequence having at least 75%, at least 80%, at least 85%, at least 90%, at least 95%, at least 98%, at least 99%, or 100%, amino acid sequence identity to a contiguous stretch of from 40 to 46 amino acids of amino acids 729-775 of the S. pyogenes Cas9 amino acid sequence set forth in SEQ ID NO: 1545, or a corresponding segment of a Cas9 polypeptide amino acid sequence set forth in any of SEQ ID NOs: 1-259 and 795-1346; and can have a length of from 40 amino acids to about 60 amino acids, e.g., from 40 amino acids to 45 amino acids, from 45 amino acids to 50 amino acids, from 50 amino acids to 55 amino acids, or from 55 amino acids to 60 amino acids. In some cases, a RuvCII polypeptide comprises an amino acid sequence having at least 75%, at least 80%, at least 85%, at least 90%, at least 95%, at least 98%, at least 99%, or 100%, amino acid sequence identity to amino acids 728-774 of the S. pyogenes Cas9 amino acid sequence set forth in SEQ ID NO: 1545, or a corresponding segment of a Cas9 polypeptide amino acid sequence set forth in any of SEQ ID NOs: 1-259 and 795-1346; and has a length of 45-50 (e.g., 45, 46, 47, 48, 49, or 50) amino acids.

[0143] An HNH polypeptide can comprise an amino acid sequence having at least 75%, at least 80%, at least 85%, at least 90%, at least 95%, at least 98%, at least 99%, or 100%, amino acid sequence identity to a contiguous stretch of from 100 to 134 amino acids of amino acids 776-909 of the S. pyogenes Cas9 amino acid sequence set forth in SEQ ID NO: 1545, or a corresponding segment of a Cas9 polypeptide amino acid sequence set forth in any of SEQ ID NOs: 1-259 and 795-1346; and can have a length of from 90 amino acids to 150 amino acids, e.g., from 90 amino acids to 95 amino acids, from 95 to amino acids to 100 amino acids, from 100 amino acids to 125 amino acids, from 125 amino acids to 130 amino acids, from 130 amino acids to 135 amino acids, from 135 amino acids to 140 amino acids, from 140 amino acids to 145 amino acids, or from 145 amino acids to 150 amino acids. In some cases, an HNH polypeptide comprises an amino acid sequence having at least 75%, at least 80%, at least 85%, at least 90%, at least 95%, at least 98%, at least 99%, or 100%, amino acid sequence identity to amino acids 776-909 of the S. pyogenes Cas9 amino acid sequence set forth in SEQ ID NO: 1545, or a corresponding segment of a Cas9 polypeptide amino acid sequence set forth in any of SEQ ID NOs: 1-259 and 795-1346; and has a length of from 130 amino acids to 140 amino acids (e.g., 130, 131, 132, 133, 134, 135, 136, 137, 138, 139, or 140 amino acids).

[0144] A RuvCIII polypeptide can comprise an amino acid sequence having at least 75%, at least 80%, at least 85%, at least 90%, at least 95%, at least 98%, at least 99%, or 100%, amino acid sequence identity to a contiguous stretch of from 150 amino acids to 190 amino acids of amino acids 910 to 1099 of the S. pyogenes Cas9 amino acid sequence set forth in SEQ ID NO: 1545, or a corresponding segment of a Cas9 polypeptide amino acid sequence set forth in any of SEQ ID NOs: 1-259 and 795-1346; and can have a length of from 150 amino acids to 160 amino acids, from 160 amino acids to 170 amino acids, from 170 amino acids to 180 amino acids, from 180 amino acids to 190 amino acids, from 190 amino acids to 200 amino acids, from 200 amino acids to 210 amino acids, or from 210 amino acids to 220 amino acids. In some cases, a RuvCIII polypeptide comprises an amino acid sequence having at least 75%, at least 80%, at least 85%, at least 90%, at least 95%, at least 98%, at least 99%, or 100%, amino acid sequence identity to amino acids 910 to 1099 of the S. pyogenes Cas9 amino acid sequence set forth in SEQ ID NO: 1545, or a corresponding segment of a Cas9 polypeptide amino acid sequence set forth in any of SEQ ID NOs: 1-259 and 795-1346; and has a length of from 180 amino acids to 190 amino acids (e.g., 180, 181, 182, 183, 184, 185, 186, 187, 188, 189, or 190 amino acids).

[0145] A PAM-interacting polypeptide can comprise an amino acid sequence having at least 75%, at least 80%, at least 85%, at least 90%, at least 95%, at least 98%, at least 99%, or 100%, amino acid sequence identity to a contiguous stretch of from 200 amino acids to 268 amino acids of amino acids 1100 to 1367 of the S. pyogenes Cas9 amino acid sequence set forth in SEQ ID NO: 1545, or a corresponding segment of a Cas9 polypeptide amino acid sequence set forth in any of SEQ ID NOs: 1-259 and 795-1346; and can have a length of from 240 amino acids to 280 amino acids, e.g., from 240 amino acids to 250 amino acids, from 250 amino acids to 260 amino acids, from 260 amino acids to 270 amino acids, or from 270 amino acids to 280 amino acids. In some cases, a PAM-interacting polypeptide comprises an amino acid sequence having at least 75%, at least 80%, at least 85%, at least 90%, at least 95%, at least 98%, at least 99%, or 100%, amino acid sequence identity to amino acids 1100 to 1367 of the S. pyogenes Cas9 amino acid sequence set forth in SEQ ID NO: 1545, or a corresponding segment of a Cas9 polypeptide amino acid sequence set forth in any of SEQ ID NOs: 1-259 and 795-1346; and has a length of from 260 amino acids to 270 amino acids (e.g., 260, 261, 262, 263, 264, 265, 266, 267, 268, 269, or 270 amino acids).

[0146] A RuvCI polypeptide can comprise an amino acid sequence having at least 75%, at least 80%, at least 85%, at least 90%, at least 95%, at least 98%, at least 99%, or 100%, amino acid sequence identity to a contiguous stretch of from 40 amino acids to 60 amino acids of amino acids 1-60 of the S. pyogenes Cas9 amino acid sequence set forth in SEQ ID NO: 1545, or a corresponding segment of a Cas9 polypeptide amino acid sequence set forth in any of SEQ ID NOs: 1-259 and 795-1346; and can have a length of from 40 amino acids to 80 amino acids, e.g., from 40 amino acids to 50 amino acids, from 50 amino acids to 60 amino acids, from 60 amino acids to 70 amino acids, or from 70 amino acids to 80 amino acids. In some cases, a RuvCI polypeptide comprises an amino acid sequence having at least 75%, at least 80%, at least 85%, at least 90%, at least 95%, at least 98%, at least 99%, or 100%, amino acid sequence identity to amino acids 1-60 of the S. pyogenes Cas9 amino acid sequence set forth in SEQ ID NO: 1545, or a corresponding segment of a Cas9 polypeptide amino acid sequence set forth in any of SEQ ID NOs: 1-259 and 795-1346; and has a length of from 50 amino acids to 60 amino acids (e.g., 50, 51, 52, 53, 54, 55, 56, 57, 58, 59, or 60 amino acids).

[0147] Cas9 Nuclease Lobe Circular Permutant 2

[0148] In some cases, the first fusion polypeptide comprises, in order from N-terminus to C-terminus: a) a first fusion partner; and b) a first polypeptide comprising: i) a C-terminal portion of an HNH polypeptide; ii) a RuvCIII polypeptide; iii) a PAM-interacting polypeptide; v) a RuvCI polypeptide; vi) a RuvCII polypeptide; and vi) an N-terminal portion of an HNH polypeptide. In some cases, the first fusion polypeptide comprises, in order from N-terminus to C-terminus: a) a first polypeptide comprising: i) a C-terminal portion of an HNH polypeptide; ii) a RuvCIII polypeptide; iii) a PAM-interacting polypeptide; v) a RuvCI polypeptide; vi) a RuvCII polypeptide; and vi) an N-terminal portion of an HNH polypeptide; and b) a first fusion partner. In some cases, the first fusion partner is a first member of a dimerization pair. Suitable first members of a dimerization pair are described herein.

[0149] In some cases, the first fusion polypeptide comprises a heterologous sequence that provides for subcellular localization (e.g., a nuclear localization signal (NLS) for targeting to the nucleus; a mitochondrial localization signal for targeting to the mitochondria; a chloroplast localization signal for targeting to a chloroplast; an ER retention signal; and the like). In some cases, the first fusion polypeptide includes 2 or more, 3 or more, 4 or more, or 5 or more NLSs. In some cases, an NLS is located at or near (e.g., within 75 amino acids, 50 amino acids, or 30 amino acids) the N-terminus and/or at or near (e.g., within 75 amino acids, 50 amino acids, or 30 amino acids) the C-terminus. In some cases, the first fusion polypeptide comprises a nuclear localization signal (NLS).

[0150] In some cases, the first fusion polypeptide comprises, in order from N-terminus to C-terminus: a) an NLS; b) a first fusion partner; and c) a first polypeptide comprising: i) a C-terminal portion of an HNH polypeptide; ii) a RuvCIII polypeptide; iii) a PAM-interacting polypeptide; v) a RuvCI polypeptide; vi) a RuvCII polypeptide; and vi) an N-terminal portion of an HNH polypeptide. In some cases, the first fusion polypeptide comprises, in order from N-terminus to C-terminus: a) a first polypeptide comprising: i) a C-terminal portion of an HNH polypeptide; ii) a RuvCIII polypeptide; iii) a PAM-interacting polypeptide; v) a RuvCI polypeptide; vi) a RuvCII polypeptide; and vi) an N-terminal portion of an HNH polypeptide; b) a first fusion partner; and c) an NLS. In some cases, the first fusion polypeptide comprises, in order from N-terminus to C-terminus: a) an NLS; b) a first fusion partner; c) a first polypeptide comprising: i) a C-terminal portion of an HNH polypeptide; ii) a RuvCIII polypeptide; iii) a PAM-interacting polypeptide; v) a RuvCI polypeptide; vi) a RuvCII polypeptide; and vi) an N-terminal portion of an HNH polypeptide; and d) an NLS. In some cases, the NLS comprises the amino acid sequence MAPKKKRKVGIHGVPAA (SEQ ID NO: 1546). In some cases, the NLS comprises the amino acid sequence KRPAATKKAGQAKKKK (SEQ ID NO: 1547). Other suitable NLS are described elsewhere herein. In some cases, the first fusion partner is a first member of a dimerization pair.

[0151] An NLS can be at or near the N-terminus and/or the C-terminus. In some cases, the first fusion polypeptide comprises two or more NLSs (e.g., 3 or more, 4 or more, or 5 or more NLSs). In some cases, the first fusion polypeptide comprises one or more NLSs (e.g., 2 or more, 3 or more, or 4 or more NLSs) at or near the N-terminus and/or one or more NLSs (e.g., 2 or more, 3 or more, or 4 or more NLSs) at or near the C-terminus. The term “at or near” is used here because, as is known in the art, the NLS need not be at the actual terminus of a protein, but can be positioned near (e.g., within 100 amino acids of) an N- and/or C-terminus (e.g., within 80, within 75, within 60, within 55, within 50, within 45, within 40, within 35, or within 30 amino acids of the an N-and/or C-terminus).

[0152] In some cases, a first fusion polypeptide comprises one or more linker polypeptides. For example, a linker polypeptide can be interposed between any of: a) an NLS and a fusion partner; b) a fusion partner and a C-terminal portion of an HNH polypeptide; c) a PAM-interacting polypeptide and a RuvCI polypeptide; and d) an N-terminal portion of an HNH polypeptide and a fusion partner. Suitable linker polypeptides are as described above.

[0153] A C-terminal portion of an HNH polypeptide can comprise an amino acid sequence having at least 75%, at least 80%, at least 85%, at least 90%, at least 95%, at least 98%, at least 99%, or 100%, amino acid sequence identity to a contiguous stretch of from 35 to 42 amino acids of amino acids 868-909 of the S. pyogenes Cas9 amino acid sequence set forth in SEQ ID NO: 1545, or a corresponding segment of a Cas9 polypeptide amino acid sequence set forth in any of SEQ ID NOs: 1-259 and 795-1346; and can have a length of from 35 to 42 amino acids (e.g., 35, 36, 37, 38, 39, 40, 41, or 42 amino acids). A C-terminal portion of an HNH polypeptide can comprise an amino acid sequence having at least 75%, at least 80%, at least 85%, at least 90%, at least 95%, at least 98%, at least 99%, or 100%, amino acid sequence identity to a contiguous stretch of from 50 amino acids to 67 amino acids of amino acids 842-909 of the S. pyogenes Cas9 amino acid sequence set forth in SEQ ID NO: 1545, or a corresponding segment of a Cas9 polypeptide amino acid sequence set forth in any of SEQ ID NOs: 1-259 and 795-1346; and can have a length of from 50 amino acids to 80 amino acids, e.g., from 50 amino acids to 60 amino acids, from 60 amino acids to 70 amino acids, or from 70 amino acids to 80 amino acids.

[0154] An N-terminal portion of an HNH polypeptide can comprise an amino acid sequence having at least 75%, at least 80%, at least 85%, at least 90%, at least 95%, at least 98%, at least 99%, or 100%, amino acid sequence identity to a contiguous stretch of from 80 amino acids to 92 amino acids of amino acids 776 to 867 of the S. pyogenes Cas9 amino acid sequence set forth in SEQ ID NO: 1545, or a corresponding segment of a Cas9 polypeptide amino acid sequence set forth in any of SEQ ID NOs: 1-259 and 795-1346; and can have a length of from 80 amino acids to 110 amino acids, e.g., from 80 amino acids to 90 amino acids, from 90 amino acids to 100 amino acids, or from 100 amino acids to 110 amino acids. In some cases, an N-terminal portion of an HNH polypeptide comprises an amino acid sequence having at least 75%, at least 80%, at least 85%, at least 90%, at least 95%, at least 98%, at least 99%, or 100%, amino acid sequence identity to amino acids 776 to 867 of the S. pyogenes Cas9 amino acid sequence set forth in SEQ ID NO: 1545, or a corresponding segment of a Cas9 polypeptide amino acid sequence set forth in any of SEQ ID NOs: 1-259 and 795-1346; and has a length of 85 amino acids to 95 amino acids (85, 86, 87, 88, 89, 90, 91, 92, 93, 94, or 95 amino acids). An N-terminal portion of an HNH polypeptide can comprise an amino acid sequence having at least 75%, at least 80%, at least 85%, at least 90%, at least 95%, at least 98%, at least 99%, or 100%, amino acid sequence identity to a contiguous stretch of from 50 amino acids to 66 amino acids of amino acids 776-841 of the S. pyogenes Cas9 amino acid sequence set forth in SEQ ID NO: 1545, or a corresponding segment of a Cas9 polypeptide amino acid sequence set forth in any of SEQ ID NOs: 1-259 and 795-1346; and can have a length of from 50 amino acids to 80 amino acids, e.g., from 50 amino acids to 60 amino acids, from 60 amino acids to 70 amino acids, or from 70 amino acids to 80 amino acids.

[0155] A RuvCIII polypeptide can comprise an amino acid sequence having at least 75%, at least 80%, at least 85%, at least 90%, at least 95%, at least 98%, at least 99%, or 100%, amino acid sequence identity to a contiguous stretch of from 150 amino acids to 190 amino acids of amino acids 910 to 1099 of the S. pyogenes Cas9 amino acid sequence set forth in SEQ ID NO: 1545, or a corresponding segment of a Cas9 polypeptide amino acid sequence set forth in any of SEQ ID NOs: 1-259 and 795-1346; and can have a length of from 150 amino acids to 160 amino acids, from 160 amino acids to 170 amino acids, from 170 amino acids to 180 amino acids, from 180 amino acids to 190 amino acids, from 190 amino acids to 200 amino acids, from 200 amino acids to 210 amino acids, or from 210 amino acids to 220 amino acids. In some cases, a RuvCIII polypeptide comprises an amino acid sequence having at least 75%, at least 80%, at least 85%, at least 90%, at least 95%, at least 98%, at least 99%, or 100%, amino acid sequence identity to amino acids 910 to 1099 of the S. pyogenes Cas9 amino acid sequence set forth in SEQ ID NO: 1545, or a corresponding segment of a Cas9 polypeptide amino acid sequence set forth in any of SEQ ID NOs: 1-259 and 795-1346; and has a length of from 180 amino acids to 190 amino acids (e.g., 180, 181, 182, 183, 184, 185, 186, 187, 188, 189, or 190 amino acids).

[0156] A PAM-interacting polypeptide can comprise an amino acid sequence having at least 75%, at least 80%, at least 85%, at least 90%, at least 95%, at least 98%, at least 99%, or 100%, amino acid sequence identity to a contiguous stretch of from 200 amino acids to 268 amino acids of amino acids 1100 to 1367 of the S. pyogenes Cas9 amino acid sequence set forth in SEQ ID NO: 1545, or a corresponding segment of a Cas9 polypeptide amino acid sequence set forth in any of SEQ ID NOs: 1-259 and 795-1346; and can have a length of from 240 amino acids to 280 amino acids, e.g., from 240 amino acids to 250 amino acids, from 250 amino acids to 260 amino acids, from 260 amino acids to 270 amino acids, or from 270 amino acids to 280 amino acids. In some cases, a PAM-interacting polypeptide comprises an amino acid sequence having at least 75%, at least 80%, at least 85%, at least 90%, at least 95%, at least 98%, at least 99%, or 100%, amino acid sequence identity to amino acids 1100 to 1367 of the S. pyogenes Cas9 amino acid sequence set forth in SEQ ID NO: 1545, or a corresponding segment of a Cas9 polypeptide amino acid sequence set forth in any of SEQ ID NOs: 1-259 and 795-1346; and has a length of from 260 amino acids to 270 amino acids (e.g., 260, 261, 262, 263, 264, 265, 266, 267, 268, 269, or 270 amino acids).

[0157] A RuvCI polypeptide can comprise an amino acid sequence having at least 75%, at least 80%, at least 85%, at least 90%, at least 95%, at least 98%, at least 99%, or 100%, amino acid sequence identity to a contiguous stretch of from 40 amino acids to 60 amino acids of amino acids 1-60 of the S. pyogenes Cas9 amino acid sequence set forth in SEQ ID NO: 1545, or a corresponding segment of a Cas9 polypeptide amino acid sequence set forth in any of SEQ ID NOs: 1-259 and 795-1346; and can have a length of from 40 amino acids to 80 amino acids, e.g., from 40 amino acids to 50 amino acids, from 50 amino acids to 60 amino acids, from 60 amino acids to 70 amino acids, or from 70 amino acids to 80 amino acids. In some cases, a RuvCI polypeptide comprises an amino acid sequence having at least 75%, at least 80%, at least 85%, at least 90%, at least 95%, at least 98%, at least 99%, or 100%, amino acid sequence identity to amino acids 1-60 of the S. pyogenes Cas9 amino acid sequence set forth in SEQ ID NO: 1545, or a corresponding segment of a Cas9 polypeptide amino acid sequence set forth in any of SEQ ID NOs: 1-259 and 795-1346; and has a length of from 50 amino acids to 60 amino acids (e.g., 50, 51, 52, 53, 54, 55, 56, 57, 58, 59, or 60 amino acids).

[0158] A RuvCII polypeptide can comprise an amino acid sequence having at least 75%, at least 80%, at least 85%, at least 90%, at least 95%, at least 98%, at least 99%, or 100%, amino acid sequence identity to a contiguous stretch of from 40 to 46 amino acids of amino acids 729-775 of the S. pyogenes Cas9 amino acid sequence set forth in SEQ ID NO: 1545, or a corresponding segment of a Cas9 polypeptide amino acid sequence set forth in any of SEQ ID NOs: 1-259 and 795-1346; and can have a length of from 40 amino acids to about 60 amino acids, e.g., from 40 amino acids to 45 amino acids, from 45 amino acids to 50 amino acids, from 50 amino acids to 55 amino acids, or from 55 amino acids to 60 amino acids. In some cases, a RuvCII polypeptide comprises an amino acid sequence having at least 75%, at least 80%, at least 85%, at least 90%, at least 95%, at least 98%, at least 99%, or 100%, amino acid sequence identity to amino acids 728-774 of the S. pyogenes Cas9 amino acid sequence set forth in SEQ ID NO: 1545, or a corresponding segment of a Cas9 polypeptide amino acid sequence set forth in any of SEQ ID NOs: 1-259 and 795-1346; and has a length of 45-50 (e.g., 45, 46, 47, 48, 49, or 50) amino acids.

[0159] Cas9 Nuclease Lobe Circular Permutant 3

[0160] In some cases, the first fusion polypeptide comprises, in order from N-terminus to C-terminus: a) a first fusion partner; and b) a first polypeptide comprising: i) an HNH polypeptide; ii) a RuvCIII polypeptide; iii) a PAM-interacting polypeptide; iv) a RuvCI polypeptide; and vi) a RuvCII polypeptide. In some cases, the first fusion polypeptide comprises, in order from N-terminus to C-terminus: a) a first polypeptide comprising: i) an HNH polypeptide; ii) a RuvCIII polypeptide; iii) a PAM-interacting polypeptide; iv) a RuvCI polypeptide; and vi) a RuvCII polypeptide; and b) a first fusion partner. In some cases, the first fusion partner is a first member of a dimerization pair. Suitable first members of a dimerization pair are described herein.

[0161] In some cases, the first fusion polypeptide comprises a heterologous sequence that provides for subcellular localization (e.g., a nuclear localization signal (NLS) for targeting to the nucleus; a mitochondrial localization signal for targeting to the mitochondria; a chloroplast localization signal for targeting to a chloroplast; an ER retention signal; and the like). In some cases, the first fusion polypeptide includes 2 or more, 3 or more, 4 or more, or 5 or more NLSs. In some cases, an NLS is located at or near (e.g., within 75 amino acids, 50 amino acids, or 30 amino acids) the N-terminus and/or at or near (e.g., within 75 amino acids, 50 amino acids, or 30 amino acids) the C-terminus. In some cases, the first fusion polypeptide comprises a nuclear localization signal (NLS).

[0162] In some cases, the first fusion polypeptide comprises, in order from N-terminus to C-terminus: a) an NLS; b) a first fusion partner; and c) a first polypeptide comprising: i) an HNH polypeptide; ii) a RuvCIII polypeptide; iii) a PAM-interacting polypeptide; iv) a RuvCI polypeptide; and vi) a RuvCII polypeptide. In some cases, the first fusion polypeptide comprises, in order from N-terminus to C-terminus: a) a first polypeptide comprising: i) an HNH polypeptide; ii) a RuvCIII polypeptide; iii) a PAM-interacting polypeptide; iv) a RuvCI polypeptide; and vi) a RuvCII polypeptide; b) a first fusion partner; and c) an NLS. In some cases, the first fusion polypeptide comprises, in order from N-terminus to C-terminus: a) an NLS; b) a first fusion partner; c) a first polypeptide comprising: i) an HNH polypeptide; ii) a RuvCIII polypeptide; iii) a PAM-interacting polypeptide; iv) a RuvCI polypeptide; and vi) a RuvCII polypeptide; and d) an NLS. In some cases, the NLS comprises the amino acid sequence MAPKKKRKVGIHGVPAA (SEQ ID NO: 1546). In some cases, the NLS comprises the amino acid sequence KRPAATKKAGQAKKKK (SEQ ID NO: 1547). Other suitable NLS are described elsewhere herein. In some cases, the first fusion partner is a first member of a dimerization pair.

[0163] An NLS can be at or near the N-terminus and/or the C-terminus. In some cases, the first fusion polypeptide comprises two or more NLSs (e.g., 3 or more, 4 or more, or 5 or more NLSs). In some cases, the first fusion polypeptide comprises one or more NLSs (e.g., 2 or more, 3 or more, or 4 or more NLSs) at or near the N-terminus and/or one or more NLSs (e.g., 2 or more, 3 or more, or 4 or more NLSs) at or near the C-terminus. The term “at or near” is used here because, as is known in the art, the NLS need not be at the actual terminus of a protein, but can be positioned near (e.g., within 100 amino acids of) an N- and/or C-terminus (e.g., within 80, within 75, within 60, within 55, within 50, within 45, within 40, within 35, or within 30 amino acids of the an N-and/or C-terminus).

[0164] In some cases, a first fusion polypeptide comprises one or more linker polypeptides. For example, a linker polypeptide can be interposed between any of: a) an NLS and a fusion partner; b) a fusion partner and an HNH polypeptide; c) a PAM-interacting polypeptide and a RuvCI polypeptide; and d) a RuvCII polypeptide and a fusion partner. Suitable linker polypeptides are as described above.

[0165] A RuvCIII polypeptide can comprise an amino acid sequence having at least 75%, at least 80%, at least 85%, at least 90%, at least 95%, at least 98%, at least 99%, or 100%, amino acid sequence identity to a contiguous stretch of from 150 amino acids to 190 amino acids of amino acids 910 to 1099 of the S. pyogenes Cas9 amino acid sequence set forth in SEQ ID NO: 1545, or a corresponding segment of a Cas9 polypeptide amino acid sequence set forth in any of SEQ ID NOs: 1-259 and 795-1346; and can have a length of from 150 amino acids to 160 amino acids, from 160 amino acids to 170 amino acids, from 170 amino acids to 180 amino acids, from 180 amino acids to 190 amino acids, from 190 amino acids to 200 amino acids, from 200 amino acids to 210 amino acids, or from 210 amino acids to 220 amino acids. In some cases, a RuvCIII polypeptide comprises an amino acid sequence having at least 75%, at least 80%, at least 85%, at least 90%, at least 95%, at least 98%, at least 99%, or 100%, amino acid sequence identity to amino acids 910 to 1099 of the S. pyogenes Cas9 amino acid sequence set forth in SEQ ID NO: 1545, or a corresponding segment of a Cas9 polypeptide amino acid sequence set forth in any of SEQ ID NOs: 1-259 and 795-1346; and has a length of from 180 amino acids to 190 amino acids (e.g., 180, 181, 182, 183, 184, 185, 186, 187, 188, 189, or 190 amino acids).

[0166] A PAM-interacting polypeptide can comprise an amino acid sequence having at least 75%, at least 80%, at least 85%, at least 90%, at least 95%, at least 98%, at least 99%, or 100%, amino acid sequence identity to a contiguous stretch of from 200 amino acids to 268 amino acids of amino acids 1100 to 1367 of the S. pyogenes Cas9 amino acid sequence set forth in SEQ ID NO: 1545, or a corresponding segment of a Cas9 polypeptide amino acid sequence set forth in any of SEQ ID NOs: 1-259 and 795-1346; and can have a length of from 240 amino acids to 280 amino acids, e.g., from 240 amino acids to 250 amino acids, from 250 amino acids to 260 amino acids, from 260 amino acids to 270 amino acids, or from 270 amino acids to 280 amino acids. In some cases, a PAM-interacting polypeptide comprises an amino acid sequence having at least 75%, at least 80%, at least 85%, at least 90%, at least 95%, at least 98%, at least 99%, or 100%, amino acid sequence identity to amino acids 1100 to 1367 of the S. pyogenes Cas9 amino acid sequence set forth in SEQ ID NO: 1545, or a corresponding segment of a Cas9 polypeptide amino acid sequence set forth in any of SEQ ID NOs: 1-259 and 795-1346; and has a length of from 260 amino acids to 270 amino acids (e.g., 260, 261, 262, 263, 264, 265, 266, 267, 268, 269, or 270 amino acids).

[0167] A RuvCI polypeptide can comprise an amino acid sequence having at least 75%, at least 80%, at least 85%, at least 90%, at least 95%, at least 98%, at least 99%, or 100%, amino acid sequence identity to a contiguous stretch of from 40 amino acids to 60 amino acids of amino acids 1-60 of the S. pyogenes Cas9 amino acid sequence set forth in SEQ ID NO: 1545, or a corresponding segment of a Cas9 polypeptide amino acid sequence set forth in any of SEQ ID NOs: 1-259 and 795-1346; and can have a length of from 40 amino acids to 80 amino acids, e.g., from 40 amino acids to 50 amino acids, from 50 amino acids to 60 amino acids, from 60 amino acids to 70 amino acids, or from 70 amino acids to 80 amino acids. In some cases, a RuvCI polypeptide comprises an amino acid sequence having at least 75%, at least 80%, at least 85%, at least 90%, at least 95%, at least 98%, at least 99%, or 100%, amino acid sequence identity to amino acids 1-60 of the S. pyogenes Cas9 amino acid sequence set forth in SEQ ID NO: 1545, or a corresponding segment of a Cas9 polypeptide amino acid sequence set forth in any of SEQ ID NOs: 1-259 and 795-1346; and has a length of from 50 amino acids to 60 amino acids (e.g., 50, 51, 52, 53, 54, 55, 56, 57, 58, 59, or 60 amino acids).

[0168] A RuvCII polypeptide can comprise an amino acid sequence having at least 75%, at least 80%, at least 85%, at least 90%, at least 95%, at least 98%, at least 99%, or 100%, amino acid sequence identity to a contiguous stretch of from 40 to 46 amino acids of amino acids 729-775 of the S. pyogenes Cas9 amino acid sequence set forth in SEQ ID NO: 1545, or a corresponding segment of a Cas9 polypeptide amino acid sequence set forth in any of SEQ ID NOs: 1-259 and 795-1346; and can have a length of from 40 amino acids to about 60 amino acids, e.g., from 40 amino acids to 45 amino acids, from 45 amino acids to 50 amino acids, from 50 amino acids to 55 amino acids, or from 55 amino acids to 60 amino acids. In some cases, a RuvCII polypeptide comprises an amino acid sequence having at least 75%, at least 80%, at least 85%, at least 90%, at least 95%, at least 98%, at least 99%, or 100%, amino acid sequence identity to amino acids 728-774 of the S. pyogenes Cas9 amino acid sequence set forth in SEQ ID NO: 1545, or a corresponding segment of a Cas9 polypeptide amino acid sequence set forth in any of SEQ ID NOs: 1-259 and 795-1346; and has a length of 45-50 (e.g., 45, 46, 47, 48, 49, or 50) amino acids.

[0169] An HNH polypeptide can comprise an amino acid sequence having at least 75%, at least 80%, at least 85%, at least 90%, at least 95%, at least 98%, at least 99%, or 100%, amino acid sequence identity to a contiguous stretch of from 100 to 134 amino acids of amino acids 776-909 of the S. pyogenes Cas9 amino acid sequence set forth in SEQ ID NO: 1545, or a corresponding segment of a Cas9 polypeptide amino acid sequence set forth in any of SEQ ID NOs: 1-259 and 795-1346; and can have a length of from 90 amino acids to 150 amino acids, e.g., from 90 amino acids to 95 amino acids, from 95 to amino acids to 100 amino acids, from 100 amino acids to 125 amino acids, from 125 amino acids to 130 amino acids, from 130 amino acids to 135 amino acids, from 135 amino acids to 140 amino acids, from 140 amino acids to 145 amino acids, or from 145 amino acids to 150 amino acids. In some cases, an HNH polypeptide comprises an amino acid sequence having at least 75%, at least 80%, at least 85%, at least 90%, at least 95%, at least 98%, at least 99%, or 100%, amino acid sequence identity to amino acids 776-909 of the S. pyogenes Cas9 amino acid sequence set forth in SEQ ID NO: 1545, or a corresponding segment of a Cas9 polypeptide amino acid sequence set forth in any of SEQ ID NOs: 1-259 and 795-1346; and has a length of from 130 amino acids to 140 amino acids (e.g., 130, 131, 132, 133, 134, 135, 136, 137, 138, 139, or 140 amino acids).

[0170] Cas9 Nuclease Lobe Circular Permutant 4

[0171] In some cases, the first fusion polypeptide comprises, in order from N-terminus to C-terminus: a) a first fusion partner; and b) a first polypeptide comprising: i) a RuvCIII polypeptide; ii) a PAM-interacting polypeptide; iii) a RuvCI polypeptide; iv) a RuvCII polypeptide; and v) an HNH polypeptide. In some cases, the first fusion polypeptide comprises, in order from N-terminus to C-terminus: a) a first polypeptide comprising: i) a RuvCIII polypeptide; ii) a PAM-interacting polypeptide; iii) a RuvCI polypeptide; iv) a RuvCII polypeptide; and v) an HNH polypeptide; and b) a first fusion partner. In some cases, the first fusion partner is a first member of a dimerization pair. Suitable first members of a dimerization pair are described herein.

[0172] In some cases, the first fusion polypeptide comprises a heterologous sequence that provides for subcellular localization (e.g., a nuclear localization signal (NLS) for targeting to the nucleus; a mitochondrial localization signal for targeting to the mitochondria; a chloroplast localization signal for targeting to a chloroplast; an ER retention signal; and the like). In some cases, the first fusion polypeptide includes 2 or more, 3 or more, 4 or more, or 5 or more NLSs. In some cases, an NLS is located at or near (e.g., within 75 amino acids, 50 amino acids, or 30 amino acids) the N-terminus and/or at or near (e.g., within 75 amino acids, 50 amino acids, or 30 amino acids) the C-terminus. In some cases, the first fusion polypeptide comprises a nuclear localization signal (NLS).

[0173] In some cases, the first fusion polypeptide comprises, in order from N-terminus to C-terminus: a) an NLS; b) a first fusion partner; and c) a first polypeptide comprising: i) a RuvCIII polypeptide; ii) a PAM-interacting polypeptide; iii) a RuvCI polypeptide; iv) a RuvCII polypeptide; and v) an HNH polypeptide. In some cases, the first fusion polypeptide comprises, in order from N-terminus to C-terminus: a) a first polypeptide comprising: i) a RuvCIII polypeptide; ii) a PAM-interacting polypeptide; iii) a RuvCI polypeptide; iv) a RuvCII polypeptide; and v) an HNH polypeptide; b) a first fusion partner; and c) a fusion partner. In some cases, the first fusion polypeptide comprises, in order from N-terminus to C-terminus: a) an NLS; b) a first fusion partner; c) a first polypeptide comprising: i) a RuvCIII polypeptide; ii) a PAM-interacting polypeptide; iii) a RuvCI polypeptide; iv) a RuvCII polypeptide; and v) an HNH polypeptide; d) an NLS. In some cases, the first fusion partner is a first member of a dimerization pair. In some cases, the NLS comprises the amino acid sequence MAPKKKRKVGIHGVPAA (SEQ ID NO: 1546). In some cases, the NLS comprises the amino acid sequence KRPAATKKAGQAKKKK (SEQ ID NO: 1547). Other suitable NLS are described elsewhere herein. In some cases, the first fusion partner is a first member of a dimerization pair.

[0174] An NLS can be at or near the N-terminus and/or the C-terminus. In some cases, the first fusion polypeptide comprises two or more NLSs (e.g., 3 or more, 4 or more, or 5 or more NLSs). In some cases, the first fusion polypeptide comprises one or more NLSs (e.g., 2 or more, 3 or more, or 4 or more NLSs) at or near the N-terminus and/or one or more NLSs (e.g., 2 or more, 3 or more, or 4 or more NLSs) at or near the C-terminus. The term “at or near” is used here because, as is known in the art, the NLS need not be at the actual terminus of a protein, but can be positioned near (e.g., within 100 amino acids of) an N- and/or C-terminus (e.g., within 80, within 75, within 60, within 55, within 50, within 45, within 40, within 35, or within 30 amino acids of the an N-and/or C-terminus).

[0175] In some cases, a first fusion polypeptide comprises one or more linker polypeptides. For example, a linker polypeptide can be interposed between any of: a) an NLS and a fusion partner; b) a fusion partner and a RuvCIII polypeptide; c) a PAM-interacting polypeptide and a RuvCI polypeptide; and d) an HNH polypeptide and a fusion partner. Suitable linker polypeptides are as described above.

[0176] A RuvCIII polypeptide can comprise an amino acid sequence having at least 75%, at least 80%, at least 85%, at least 90%, at least 95%, at least 98%, at least 99%, or 100%, amino acid sequence identity to a contiguous stretch of from 150 amino acids to 190 amino acids of amino acids 910 to 1099 of the S. pyogenes Cas9 amino acid sequence set forth in SEQ ID NO: 1545, or a corresponding segment of a Cas9 polypeptide amino acid sequence set forth in any of SEQ ID NOs: 1-259 and 795-1346; and can have a length of from 150 amino acids to 160 amino acids, from 160 amino acids to 170 amino acids, from 170 amino acids to 180 amino acids, from 180 amino acids to 190 amino acids, from 190 amino acids to 200 amino acids, from 200 amino acids to 210 amino acids, or from 210 amino acids to 220 amino acids. In some cases, a RuvCIII polypeptide comprises an amino acid sequence having at least 75%, at least 80%, at least 85%, at least 90%, at least 95%, at least 98%, at least 99%, or 100%, amino acid sequence identity to amino acids 910 to 1099 of the S. pyogenes Cas9 amino acid sequence set forth in SEQ ID NO: 1545, or a corresponding segment of a Cas9 polypeptide amino acid sequence set forth in any of SEQ ID NOs: 1-259 and 795-1346; and has a length of from 180 amino acids to 190 amino acids (e.g., 180, 181, 182, 183, 184, 185, 186, 187, 188, 189, or 190 amino acids).

[0177] A PAM-interacting polypeptide can comprise an amino acid sequence having at least 75%, at least 80%, at least 85%, at least 90%, at least 95%, at least 98%, at least 99%, or 100%, amino acid sequence identity to a contiguous stretch of from 200 amino acids to 268 amino acids of amino acids 1100 to 1367 of the S. pyogenes Cas9 amino acid sequence set forth in SEQ ID NO: 1545, or a corresponding segment of a Cas9 polypeptide amino acid sequence set forth in any of SEQ ID NOs: 1-259 and 795-1346; and can have a length of from 240 amino acids to 280 amino acids, e.g., from 240 amino acids to 250 amino acids, from 250 amino acids to 260 amino acids, from 260 amino acids to 270 amino acids, or from 270 amino acids to 280 amino acids. In some cases, a PAM-interacting polypeptide comprises an amino acid sequence having at least 75%, at least 80%, at least 85%, at least 90%, at least 95%, at least 98%, at least 99%, or 100%, amino acid sequence identity to amino acids 1100 to 1367 of the S. pyogenes Cas9 amino acid sequence set forth in SEQ ID NO: 1545, or a corresponding segment of a Cas9 polypeptide amino acid sequence set forth in any of SEQ ID NOs: 1-259 and 795-1346; and has a length of from 260 amino acids to 270 amino acids (e.g., 260, 261, 262, 263, 264, 265, 266, 267, 268, 269, or 270 amino acids).

[0178] A RuvCI polypeptide can comprise an amino acid sequence having at least 75%, at least 80%, at least 85%, at least 90%, at least 95%, at least 98%, at least 99%, or 100%, amino acid sequence identity to a contiguous stretch of from 40 amino acids to 60 amino acids of amino acids 1-60 of the S. pyogenes Cas9 amino acid sequence set forth in SEQ ID NO: 1545, or a corresponding segment of a Cas9 polypeptide amino acid sequence set forth in any of SEQ ID NOs: 1-259 and 795-1346; and can have a length of from 40 amino acids to 80 amino acids, e.g., from 40 amino acids to 50 amino acids, from 50 amino acids to 60 amino acids, from 60 amino acids to 70 amino acids, or from 70 amino acids to 80 amino acids. In some cases, a RuvCI polypeptide comprises an amino acid sequence having at least 75%, at least 80%, at least 85%, at least 90%, at least 95%, at least 98%, at least 99%, or 100%, amino acid sequence identity to amino acids 1-60 of the S. pyogenes Cas9 amino acid sequence set forth in SEQ ID NO: 1545, or a corresponding segment of a Cas9 polypeptide amino acid sequence set forth in any of SEQ ID NOs: 1-259 and 795-1346; and has a length of from 50 amino acids to 60 amino acids (e.g., 50, 51, 52, 53, 54, 55, 56, 57, 58, 59, or 60 amino acids).

[0179] A RuvCII polypeptide can comprise an amino acid sequence having at least 75%, at least 80%, at least 85%, at least 90%, at least 95%, at least 98%, at least 99%, or 100%, amino acid sequence identity to a contiguous stretch of from 40 to 46 amino acids of amino acids 729-775 of the S. pyogenes Cas9 amino acid sequence set forth in SEQ ID NO: 1545, or a corresponding segment of a Cas9 polypeptide amino acid sequence set forth in any of SEQ ID NOs: 1-259 and 795-1346; and can have a length of from 40 amino acids to about 60 amino acids, e.g., from 40 amino acids to 45 amino acids, from 45 amino acids to 50 amino acids, from 50 amino acids to 55 amino acids, or from 55 amino acids to 60 amino acids. In some cases, a RuvCII polypeptide comprises an amino acid sequence having at least 75%, at least 80%, at least 85%, at least 90%, at least 95%, at least 98%, at least 99%, or 100%, amino acid sequence identity to amino acids 728-774 of the S. pyogenes Cas9 amino acid sequence set forth in SEQ ID NO: 1545, or a corresponding segment of a Cas9 polypeptide amino acid sequence set forth in any of SEQ ID NOs: 1-259 and 795-1346; and has a length of 45-50 (e.g., 45, 46, 47, 48, 49, or 50) amino acids.

[0180] An HNH polypeptide can comprise an amino acid sequence having at least 75%, at least 80%, at least 85%, at least 90%, at least 95%, at least 98%, at least 99%, or 100%, amino acid sequence identity to a contiguous stretch of from 100 to 134 amino acids of amino acids 776-909 of the S. pyogenes Cas9 amino acid sequence set forth in SEQ ID NO: 1545, or a corresponding segment of a Cas9 polypeptide amino acid sequence set forth in any of SEQ ID NOs: 1-259 and 795-1346; and can have a length of from 90 amino acids to 150 amino acids, e.g., from 90 amino acids to 95 amino acids, from 95 to amino acids to 100 amino acids, from 100 amino acids to 125 amino acids, from 125 amino acids to 130 amino acids, from 130 amino acids to 135 amino acids, from 135 amino acids to 140 amino acids, from 140 amino acids to 145 amino acids, or from 145 amino acids to 150 amino acids. In some cases, an HNH polypeptide comprises an amino acid sequence having at least 75%, at least 80%, at least 85%, at least 90%, at least 95%, at least 98%, at least 99%, or 100%, amino acid sequence identity to amino acids 776-909 of the S. pyogenes Cas9 amino acid sequence set forth in SEQ ID NO: 1545, or a corresponding segment of a Cas9 polypeptide amino acid sequence set forth in any of SEQ ID NOs: 1-259 and 795-1346; and has a length of from 130 amino acids to 140 amino acids (e.g., 130, 131, 132, 133, 134, 135, 136, 137, 138, 139, or 140 amino acids).

[0181] Cas9 Nuclease Lobe Circular Permutant 5

[0182] In some cases, the first fusion polypeptide comprises, in order from N-terminus to C-terminus: a) a first fusion partner; and b) a first polypeptide comprising: i) a C-terminal portion of a RuvCIII polypeptide; ii) a PAM-interacting polypeptide; iii) a RuvCI polypeptide; iv) a RuvCII polypeptide; v) an HNH polypeptide; and vi) an N-terminal portion of a RuvCIII polypeptide. In some cases, the first fusion polypeptide comprises, in order from N-terminus to C-terminus: a) a first polypeptide comprising: i) a C-terminal portion of a RuvCIII polypeptide; ii) a PAM-interacting polypeptide; iii) a RuvCI polypeptide; iv) a RuvCII polypeptide; v) an HNH polypeptide; and vi) an N-terminal portion of a RuvCIII polypeptide; and b) a first fusion partner. In some cases, the first fusion partner is a first member of a dimerization pair. Suitable first members of a dimerization pair are described elsewhere herein.

[0183] A C-terminal portion of a RuvCIII polypeptide can comprise an amino acid sequence having at least 75%, at least 80%, at least 85%, at least 90%, at least 95%, at least 98%, at least 99%, or 100%, amino acid sequence identity to a contiguous stretch of from 75 amino acids to 84 amino acids of amino acids 1016 to 1099 of the S. pyogenes Cas9 amino acid sequence set forth in SEQ ID NO: 1545, or a corresponding segment of a Cas9 polypeptide amino acid sequence set forth in any of SEQ ID NOs: 1-259 and 795-1346; and can have a length of from 70 amino acids to 100 amino acids, from 70 amino acids to 80 amino acids, from 80 amino acids to 90 amino acids, or from 90 amino acids to 100 amino acids. In some cases, a C-terminal RuvCIII polypeptide comprises an amino acid sequence having at least 75%, at least 80%, at least 85%, at least 90%, at least 95%, at least 98%, at least 99%, or 100%, amino acid sequence identity to amino acids 1016 to 1099 of the S. pyogenes Cas9 amino acid sequence set forth in SEQ ID NO: 1545, or a corresponding segment of a Cas9 polypeptide amino acid sequence set forth in any of SEQ ID NOs: 1-259 and 795-1346; and has a length of from 80 amino acids to 90 amino acids (e.g., 80, 81, 82, 83, 84, 85, 86, 87, 88, 89, or 90 amino acids).

[0184] An N-terminal portion of a RuvCIII polypeptide can comprise an amino acid sequence having at least 75%, at least 80%, at least 85%, at least 90%, at least 95%, at least 98%, at least 99%, or 100%, amino acid sequence identity to a contiguous stretch of from 80 amino acids to 106 amino acids of amino acids 910 to 1015 of the S. pyogenes Cas9 amino acid sequence set forth in SEQ ID NO: 1545, or a corresponding segment of a Cas9 polypeptide amino acid sequence set forth in any of SEQ ID NOs: 1-259 and 795-1346; and can have a length of from 80 amino acids to 120 amino acids, from 80 amino acids to 90 amino acids, from 90 amino acids to 100 amino acids, from 100 amino acids to 110 amino acids,or from 110 amino acids to 120 amino acids. In some cases, a RuvCIII polypeptide comprises an amino acid sequence having at least 75%, at least 80%, at least 85%, at least 90%, at least 95%, at least 98%, at least 99%, or 100%, amino acid sequence identity to amino acids 910 to 1015 of the S. pyogenes Cas9 amino acid sequence set forth in SEQ ID NO: 1545, or a corresponding segment of a Cas9 polypeptide amino acid sequence set forth in any of SEQ ID NOs: 1-259 and 795-1346; and has a length of from 100 amino acids to 106 amino acids (e.g., 100, 101, 102, 103, 104, 105, 106, 107, 108, 109, or 110 amino acids).

[0185] A PAM-interacting polypeptide can comprise an amino acid sequence having at least 75%, at least 80%, at least 85%, at least 90%, at least 95%, at least 98%, at least 99%, or 100%, amino acid sequence identity to a contiguous stretch of from 200 amino acids to 268 amino acids of amino acids 1100 to 1367 of the S. pyogenes Cas9 amino acid sequence set forth in SEQ ID NO: 1545, or a corresponding segment of a Cas9 polypeptide amino acid sequence set forth in any of SEQ ID NOs: 1-259 and 795-1346; and can have a length of from 240 amino acids to 280 amino acids, e.g., from 240 amino acids to 250 amino acids, from 250 amino acids to 260 amino acids, from 260 amino acids to 270 amino acids, or from 270 amino acids to 280 amino acids. In some cases, a PAM-interacting polypeptide comprises an amino acid sequence having at least 75%, at least 80%, at least 85%, at least 90%, at least 95%, at least 98%, at least 99%, or 100%, amino acid sequence identity to amino acids 1100 to 1367 of the S. pyogenes Cas9 amino acid sequence set forth in SEQ ID NO: 1545, or a corresponding segment of a Cas9 polypeptide amino acid sequence set forth in any of SEQ ID NOs: 1-259 and 795-1346; and has a length of from 260 amino acids to 270 amino acids (e.g., 260, 261, 262, 263, 264, 265, 266, 267, 268, 269, or 270 amino acids).

[0186] A RuvCI polypeptide can comprise an amino acid sequence having at least 75%, at least 80%, at least 85%, at least 90%, at least 95%, at least 98%, at least 99%, or 100%, amino acid sequence identity to a contiguous stretch of from 40 amino acids to 60 amino acids of amino acids 1-60 of the S. pyogenes Cas9 amino acid sequence set forth in SEQ ID NO: 1545, or a corresponding segment of a Cas9 polypeptide amino acid sequence set forth in any of SEQ ID NOs: 1-259 and 795-1346; and can have a length of from 40 amino acids to 80 amino acids, e.g., from 40 amino acids to 50 amino acids, from 50 amino acids to 60 amino acids, from 60 amino acids to 70 amino acids, or from 70 amino acids to 80 amino acids. In some cases, a RuvCI polypeptide comprises an amino acid sequence having at least 75%, at least 80%, at least 85%, at least 90%, at least 95%, at least 98%, at least 99%, or 100%, amino acid sequence identity to amino acids 1-60 of the S. pyogenes Cas9 amino acid sequence set forth in SEQ ID NO: 1545, or a corresponding segment of a Cas9 polypeptide amino acid sequence set forth in any of SEQ ID NOs: 1-259 and 795-1346; and has a length of from 50 amino acids to 60 amino acids (e.g., 50, 51, 52, 53, 54, 55, 56, 57, 58, 59, or 60 amino acids).

[0187] A RuvCII polypeptide can comprise an amino acid sequence having at least 75%, at least 80%, at least 85%, at least 90%, at least 95%, at least 98%, at least 99%, or 100%, amino acid sequence identity to a contiguous stretch of from 40 to 46 amino acids of amino acids 729-775 of the S. pyogenes Cas9 amino acid sequence set forth in SEQ ID NO: 1545, or a corresponding segment of a Cas9 polypeptide amino acid sequence set forth in any of SEQ ID NOs: 1-259 and 795-1346; and can have a length of from 40 amino acids to about 60 amino acids, e.g., from 40 amino acids to 45 amino acids, from 45 amino acids to 50 amino acids, from 50 amino acids to 55 amino acids, or from 55 amino acids to 60 amino acids. In some cases, a RuvCII polypeptide comprises an amino acid sequence having at least 75%, at least 80%, at least 85%, at least 90%, at least 95%, at least 98%, at least 99%, or 100%, amino acid sequence identity to amino acids 728-774 of the S. pyogenes Cas9 amino acid sequence set forth in SEQ ID NO: 1545, or a corresponding segment of a Cas9 polypeptide amino acid sequence set forth in any of SEQ ID NOs: 1-259 and 795-1346; and has a length of 45-50 (e.g., 45, 46, 47, 48, 49, or 50) amino acids.

[0188] An HNH polypeptide can comprise an amino acid sequence having at least 75%, at least 80%, at least 85%, at least 90%, at least 95%, at least 98%, at least 99%, or 100%, amino acid sequence identity to a contiguous stretch of from 100 to 134 amino acids of amino acids 776-909 of the S. pyogenes Cas9 amino acid sequence set forth in SEQ ID NO: 1545, or a corresponding segment of a Cas9 polypeptide amino acid sequence set forth in any of SEQ ID NOs: 1-259 and 795-1346; and can have a length of from 90 amino acids to 150 amino acids, e.g., from 90 amino acids to 95 amino acids, from 95 to amino acids to 100 amino acids, from 100 amino acids to 125 amino acids, from 125 amino acids to 130 amino acids, from 130 amino acids to 135 amino acids, from 135 amino acids to 140 amino acids, from 140 amino acids to 145 amino acids, or from 145 amino acids to 150 amino acids. In some cases, an HNH polypeptide comprises an amino acid sequence having at least 75%, at least 80%, at least 85%, at least 90%, at least 95%, at least 98%, at least 99%, or 100%, amino acid sequence identity to amino acids 776-909 of the S. pyogenes Cas9 amino acid sequence set forth in SEQ ID NO: 1545, or a corresponding segment of a Cas9 polypeptide amino acid sequence set forth in any of SEQ ID NOs: 1-259 and 795-1346; and has a length of from 130 amino acids to 140 amino acids (e.g., 130, 131, 132, 133, 134, 135, 136, 137, 138, 139, or 140 amino acids).

[0189] Examples of First Fusion Polypeptides

[0190] Non-limiting examples of suitable first fusion polypeptides are depicted in FIG. 1. In some embodiments, a first fusion polypeptide comprises an amino acid sequence having at least 75%, at least 80%, at least 85%, at least 90%, at least 95%, at least 98%, at least 99%, or 100%, amino acid sequence identity to amino acids 82-829 of the amino acid sequence depicted in the following paragraph. In some cases, the fusion partner is linked, directly or via a linker, to the N-terminus of the polypeptide. For example, in some cases, a first fusion polypeptide comprises, in order from N-terminus to C-terminus: a) a fusion partner; and b) a polypeptide comprising an amino acid sequence having at least 75%, at least 80%, at least 85%, at least 90%, at least 95%, at least 98%, at least 99%, or 100%, amino acid sequence identity to amino acids 82-829 of the amino acid sequence amino acid sequence depicted in the following paragraph. Suitable fusion partners include a first member of a dimerization pair, where suitable first members of a dimerization pair are described elsewhere herein. In some cases, a first fusion polypeptide comprises, in order from N-terminus to C-terminus: a) an NLS; b) a fusion partner; and c) a polypeptide comprising an amino acid sequence having at least 75%, at least 80%, at least 85%, at least 90%, at least 95%, at least 98%, at least 99%, or 100%, amino acid sequence identity to amino acids 82-829 of the amino acid sequence depicted in the following paragraph. In some cases, a first fusion polypeptide comprises, in order from N-terminus to C-terminus: a) an NLS; b) a fusion partner; c) a polypeptide comprising an amino acid sequence having at least 75%, at least 80%, at least 85%, at least 90%, at least 95%, at least 98%, at least 99%, or 100%, amino acid sequence identity to amino acids 82-829 of the amino acid sequence depicted in the following paragraph; and d) a fusion partner.

(SEQ ID NO: //)
MDYKDHDGDYKDHDIDYKDDDDKMAPKKKRKVGIHGVPAASIAATLENDL
ARLENENARLEKDIANLERDLAKLEREEAYFGGSGGSGGSASGQGDSLHE
HIANLAGSPAIKKGILQTVKVVDELVKVMGRHKPENIVIEMARENQTTQK
GQKNSRERMKRIEEGIKELGSQILKEHPVENTQLQNEKLYLYYLQNGRDM
YVDQELDINRLSDYDVDHIVPQSFLKDDSIDNKVLTRSDKNRGKSDNVPS
EEVVKKMKNYWRQLLNAKLITQRKFDNLTKAERGGLSELDKAGFIKRQLV
ETRQITKHVAQILDSRMNTKYDENDKLIREVKVITLKSKLVSDFRKDFQF
YKVREINNYHHAHDAYLNAVVGTALIKKYPKLESEFVYGDYKVYDVRKMI
AKSEQEIGKATAKYFFYSNIMNFFKTEITLANGEIRKRPLIETNGETGEI
VWDKGRDFATVRKVLSMPQVNIVKKTEVQTGGFSKESILPKRNSDKLIAR
KKDWDPKKYGGFDSPTVAYSVLVVAKVEKGKSKKLKSVKELLGITIMERS
SFEKNPIDFLEAKGYKEVKKDLIIKLPKYSLFELENGRKRMLASAGELQK
GNELALPSKYVNFLYLASHYEKLKGSPEDNEQKQLFVEQHKHYLDEIIEQ
ISEFSKRVILADANLDKVLSAYNKHRDKPIREQAENIIHLFTLTNLGAPA
AFKYFDTTIDRKRYTSTKEVLDATLIHQSITGLYETRIDLSQLGGDGSGG
SGGSGGSGGSGGSGGSGGSGGVDDKKYSIGLDIGTNSVGWAVITDEYKVP
SKKFKVLGNTDRHSIKKNLIGALLFDSGEKRPAATKKAGQAKKKK

[0191] In some embodiments, a first fusion polypeptide comprises an amino acid sequence having at least 75%, at least 80%, at least 85%, at least 90%, at least 95%, at least 98%, at least 99%, or 100%, amino acid sequence identity to amino acids 82-820 of the amino acid sequence depicted in the following paragraph. In some cases, the fusion partner is linked, directly or via a linker, to the N-terminus of the polypeptide. For example, in some cases, a first fusion polypeptide comprises, in order from N-terminus to C-terminus: a) a fusion partner; and b) a polypeptide comprising an amino acid sequence having at least 75%, at least 80%, at least 85%, at least 90%, at least 95%, at least 98%, at least 99%, or 100%, amino acid sequence identity to amino acids 82-820 of the amino acid sequence depicted in the following paragraph. Suitable fusion partners include a first member of a dimerization pair, where suitable first members of a dimerization pair are described elsewhere herein. In some cases, a first fusion polypeptide comprises, in order from N-terminus to C-terminus: a) an NLS; b) a fusion partner; and c) a polypeptide comprising an amino acid sequence having at least 75%, at least 80%, at least 85%, at least 90%, at least 95%, at least 98%, at least 99%, or 100%, amino acid sequence identity to amino acids 82-820 of the amino acid sequence depicted in the following paragraph. In some cases, a first fusion polypeptide comprises, in order from N-terminus to C-terminus: a) an NLS; b) a fusion partner; c) a polypeptide comprising an amino acid sequence having at least 75%, at least 80%, at least 85%, at least 90%, at least 95%, at least 98%, at least 99%, or 100%, amino acid sequence identity to amino acids 82-820 of the amino acid sequence depicted in the following paragraph; and d) a fusion partner.

(SEQ ID NO: //)
MDYKDHDGDYKDHDIDYKDDDDKMAPKKKRKVGIHGVPAASIAATLENDL
ARLENENARLEKDIANLERDLAKLEREEAYFGGSGGSGGSASGQGDNVPS
EEVVKKMKNYWRQLLNAKLITQRKFDNLTKAERGGLSELDKAGFIKRQLV
ETRQITKHVAQILDSRMNTKYDENDKLIREVKVITLKSKLVSDFRKDFQF
YKVREINNYHHAHDAYLNAVVGTALIKKYPKLESEFVYGDYKVYDVRKMI
AKSEQEIGKATAKYFFYSNIMNFFKTEITLANGEIRKRPLIETNGETGEI
VWDKGRDFATVRKVLSMPQVNIVKKTEVQTGGFSKESILPKRNSDKLIAR
KKDWDPKKYGGFDSPTVAYSVLVVAKVEKGKSKKLKSVKELLGITIMERS
SFEKNPIDFLEAKGYKEVKKDLIIKLPKYSLFELENGRKRMLASAGELQK
GNELALPSKYVNFLYLASHYEKLKGSPEDNEQKQLFVEQHKHYLDEIIEQ
ISEFSKRVILADANLDKVLSAYNKHRDKPIREQAENIIHLFTLTNLGAPA
AFKYFDTTIDRKRYTSTKEVLDATLIHQSITGLYETRIDLSQLGGDGSGG
SGGSGGSGGSGGSGGSGGSGGVDDKKYSIGLDIGTNSVGWAVITDEYKVP
SKKFKVLGNTDRHSIKKNLIGALLFDSGGSSGSPAIKKGILQTVKVVDEL
VKVMGRHKPENIVIEMARENQTTQKGQKNSRERMKRIEEGIKELGSQILK
EHPVENTQLQNEKLYLYYLQNGRDMYVDQELDINRLSDYDVDHIVPQSFL
KDDSIDNKVLTRSDKNRGKSEKRPAATKKAGQAKKKK.

[0192] Second Fusion Polypeptide

[0193] As described above, a Cas9 heterodimer of the present disclosure comprises: A) a first fusion polypeptide comprising: a) a first, circular permuted, polypeptide that comprises: i) a RuvCI polypeptide; ii) a RuvCII polypeptide; iii) an HNH polypeptide; iv) a RuvCIII polypeptide; and v) a PAM-interacting polypeptide; and b) a first fusion partner, where the first fusion partner is a first member of a dimerization pair; and B) a second fusion polypeptide comprising: a) a second polypeptide that comprises an alpha-helical recognition region (e.g., an alpha helical lobe); and b) a second fusion partner, where the second fusion partner is a second member of the dimerization pair. In some cases, the fusion partner is at or near (e.g., within the first 50 amino acids of the N-terminus) the N-terminus of the second polypeptide. In some cases, the fusion partner is at or near (e.g., within the first 50 amino acids of the C-terminus) the C-terminus of the second polypeptide. In some cases, the fusion partner is located internally within the second fusion polypeptide.

[0194] In some cases, the second polypeptide comprises an α-helical lobe (also referred to as “an alpha-helical recognition region”) of a Cas9 polypeptide. For example, in some cases, the second polypeptide comprises an amino acid sequence having at least 75%, at least 80%, at least 85%, at least 90%, at least 95%, at least 98%, at least 99%, or 100%, amino acid sequence identity to a contiguous stretch of from 400 amino acids to 658 amino acids of amino acids 61 to 718 of the S. pyogenes Cas9 amino acid sequence set forth in SEQ ID NO: 1545, or a corresponding segment of a Cas9 polypeptide amino acid sequence set forth in any of SEQ ID NOs: 1-259 and 795-1346; and can have a length of from 400 amino acids to 800 amino acids, e.g., from 400 amino acids to 450 amino acids, from 450 amino acids to 500 amino acids, from 500 amino acids to 550 amino acids, from 550 amino acids to 600 amino acids, from 600 amino acids to 650 amino acids, from 650 amino acids to 700 amino acids, from 700 amino acids to 750 amino acids, or from 750 amino acids to 800 amino acids. In some cases, the second polypeptide comprises an amino acid sequence having at least 75%, at least 80%, at least 85%, at least 90%, at least 95%, at least 98%, at least 99%, or 100%, amino acid sequence identity to amino acids 61-718 of the S. pyogenes Cas9 amino acid sequence set forth in SEQ ID NO: 1545, or a corresponding segment of a Cas9 polypeptide amino acid sequence set forth in any of SEQ ID NOs: 1-259 and 795-1346; and has a length of from 650 amino acids to 660 amino acids (e.g., 650, 651, 652, 653, 654, 655, 656, 657, 658, 659, or 660 amino acids).

[0195] In some cases, the second polypeptide comprises an amino acid sequence having at least 75%, at least 80%, at least 85%, at least 90%, at least 95%, at least 98%, at least 99%, or 100%, amino acid sequence identity to a contiguous stretch of from 400 amino acids to 624 amino acids of amino acids 95 to 718 of the S. pyogenes Cas9 amino acid sequence set forth in SEQ ID NO: 1545, or a corresponding segment of a Cas9 polypeptide amino acid sequence set forth in any of SEQ ID NOs: 1-259 and 795-1346; and has a length of from about 400 amino acids to 800 amino acids, e.g., from 400 amino acids to 450 amino acids, from 450 amino acids to 500 amino acids, from 500 amino acids to 550 amino acids, from 550 amino acids to 600 amino acids, from 600 amino acids to 650 amino acids, from 650 amino acids to 700 amino acids, from 700 amino acids to 750 amino acids, or from 750 amino acids to 800 amino acids. In some cases, the second polypeptide comprises an amino acid sequence having at least 75%, at least 80%, at least 85%, at least 90%, at least 95%, at least 98%, at least 99%, or 100%, amino acid sequence identity to amino acids 95 to 718 of the S. pyogenes Cas9 amino acid sequence set forth in SEQ ID NO: 1545, or a corresponding segment of a Cas9 polypeptide amino acid sequence set forth in any of SEQ ID NOs: 1-259 and 795-1346; and has a length of from 620 amino acids to 630 amino acids (e.g., 620, 621, 622, 623, 624, 625, 626, 627, 628, 629, or 630 amino acids).

[0196] In some cases, the second fusion polypeptide comprises, in order from N-terminus to C-terminus: a) a second fusion partner; and b) a second polypeptide that comprises an alpha-helical recognition region. In some cases, the second fusion polypeptide comprises, in order from N-terminus to C-terminus: a) a second polypeptide that comprises an alpha-helical recognition region; and b) a second fusion partner.

[0197] In some cases, the second fusion polypeptide comprises a heterologous sequence that provides for subcellular localization (e.g., an NLS for targeting to the nucleus; a mitochondrial localization signal for targeting to the mitochondria; a chloroplast localization signal for targeting to a chloroplast; an ER retention signal; and the like). In some cases, the second fusion polypeptide includes 2 or more, 3 or more, 4 or more, or 5 or more NLSs. In some cases, an NLS is located at or near (e.g., within 75 amino acids, 50 amino acids, or 30 amino acids) the N-terminus and/or at or near (e.g., within 75 amino acids, 50 amino acids, or 30 amino acids) the C-terminus. In some cases, the second fusion polypeptide comprises an NLS.

[0198] For example, in some cases, the second fusion polypeptide comprises, in order from N-terminus to C-terminus: a) an NLS; b) a second fusion partner; and c) a second polypeptide that comprises an alpha-helical recognition region. In some cases, the second fusion polypeptide comprises, in order from N-terminus to C-terminus: a) an NLS; b) a second fusion partner; c) a second polypeptide that comprises an alpha-helical recognition region; and d) an NLS. In some cases, the second fusion polypeptide comprises, in order from N-terminus to C-terminus: a) an NLS; b) a second polypeptide that comprises an alpha-helical recognition region; and c) a second fusion partner. In some cases, the second fusion polypeptide comprises, in order from N-terminus to C-terminus: a) an NLS; b) a second polypeptide that comprises an alpha-helical recognition region; c) a second fusion partner; and d) an NLS. In some cases, the NLS comprises the amino acid sequence MAPKKKRKVGIHGVPAA (SEQ ID NO: 1546). In some cases, the NLS comprises the amino acid sequence KRPAATKKAGQAKKKK (SEQ ID NO: 1547). Other suitable NLS are described elsewhere herein.

[0199] An NLS can be at or near the N-terminus and/or the C-terminus. In some cases, the second fusion polypeptide comprises two or more NLSs (e.g., 3 or more, 4 or more, or 5 or more NLSs). In some cases, the second fusion polypeptide comprises one or more NLSs (e.g., 2 or more, 3 or more, or 4 or more NLSs) at or near the N-terminus and/or one or more NLSs (e.g., 2 or more, 3 or more, or 4 or more NLSs) at or near the C-terminus. The term “at or near” is used here because, as is known in the art, the NLS need not be at the actual terminus of a protein, but can be positioned near (e.g., within 100 amino acids of) an N- and/or C-terminus (e.g., within 80, within 75, within 60, within 55, within 50, within 45, within 40, within 35, or within 30 amino acids of the an N-and/or C-terminus).

[0200] In some cases, the second fusion polypeptide comprises one or more linker polypeptides. For example, a linker polypeptide can be interposed between any of: a) an NLS and a fusion partner; b) a fusion partner and an alpha-helical lobe; and c) an alpha-helical lobe and an NLS.

[0201] First and Second Fusion Partners

[0202] The first fusion partner of the first fusion polypeptide, and the second fusion partner of the second fusion polypeptide, of a Cas9 heterodimer of the present disclosure constitute a “dimer pair.” A dimer pair is a pair of polypeptides that can dimerize with one another. Each member (each polypeptide) of the dimer pair can be part of a different polypeptide, and when the members of the binding pair (the dimer pair) are brought into close proximity with one another (e.g., bind to one another), the two different polypeptides (heterologous polypeptides) to which the dimer pair members are fused are brought into proximity with one another and can be said to dimerize (i.e., as a consequence of the members of the dimer pair dimerizing).

[0203] A Cas9 heterodimer of the present disclosure comprises two polypeptides that can interact to form a complex (i.e., to form the heterodimeric Cas9 protein). A Cas9 heterodimer of the present disclosure is also referred to herein as a “split Cas9” or a “split Cas9 protein.” The fusion partners present in the first fusion polypeptide and the second fusion polypeptide can be induced to dimerize by a dimerizing agent. When the fusion partners present in the first fusion polypeptide and the second fusion polypeptide dimerize, the first fusion polypeptide and the second fusion polypeptide dimerize. In the absence of the dimerizing agent, and in the absence of a guide RNA that includes a stem loop 2 and/or a stem loop 3, the first fusion polypeptide and the second fusion polypeptide do not dimerize. When the first fusion polypeptide and the second fusion polypeptide dimerize, the Cas9 heterodimer, together with a truncated guide RNA (e.g., a guide RNA that does not include stem loop 2 and/or stem loop 3), can bind a target nucleic acid. A Cas9 heterodimer of the present disclosure and a truncated guide RNA form a “Cas9 heterodimer system,” described hereinbelow.

[0204] As an illustrative example, a Cas9 heterodimer of the present disclosure comprises: A) a first fusion polypeptide (comprising a Cas9 nuclease lobe) and a first fusion partner (“a first member of a dimer pair”); and B) a second fusion polypeptide (comprising a Cas9 alpha-helical lobe) and a second fusion partner (“a second member of the dimer pair”). The first and second fusion polypeptides dimerize when the first and second binding members dimerize (when the first and second binding members are brought into close proximity with one another, e.g., via a dimerizer, via binding to one another, etc.). In some cases, the dimer pair is inducible such that the members of the dimer pair do not associate (e.g., come into proximity with one another, bind to one another, etc.) in the absence of induction (e.g., chemical induction, light induction, etc.). In some cases, the dimer pair is not inducible such that the members of the dimer pair bind to one another when both members are present (e.g., synzip polypeptides).

[0205] Any convenient dimer pair can used. Example dimer pairs suitable for use in a subject heterodimeric Cas9 protein include non-inducible binding pairs. For example, in some cases, each member of the binding pair is a protein domain that binds to the other member. As an illustrative example, in some cases, each member of the binding pair is a coiled-coil domain Examples of suitable coiled-coil domains include, but are not limited to:

SYNZIP14:
(SEQ ID NO: 1556)
NDLDAYEREAEKLEKKNEVLRNRLAALENELATLRQEVASMKQELQS
SYNZIP17:
(SEQ ID NO: 1557)
NEKEELKSKKAELRNRIEQLKQKREQLKQKIANLRKEIEAYK
SYNZIP18:
(SEQ ID NO: 1558)
SIAATLENDLARLENENARLEKDIANLERDLAKLEREEAYF

[0206] In some cases, each of the two members of a non-inducible binding pair comprise an amino acid sequence having 75% or more amino acid sequence identity (e.g., 80% or more, 85% or more, 90% or more, 95% or more, 98% or more, or 100%, amino acid sequence identity) to a coiled coil domain In some cases, a member of a non-inducible binding pair includes an amino acid sequence having 75% or more amino acid sequence identity (e.g., 80% or more, 85% or more, 90% or more, 95% or more, 98% or more, or 100%, amino acid sequence identity) to SYNZIP14 (the amino acid sequence set forth in SEQ ID NO: 1556). In some cases, a member of a non-inducible binding pair includes an amino acid sequence having 75% or more amino acid sequence identity (e.g., 80% or more, 85% or more, 90% or more, 95% or more, 98% or more, or 100%, amino acid sequence identity) to SYNZIP17 (the amino acid sequence set forth in SEQ ID NO: 1557). In some cases, a member of a non-inducible binding pair includes an amino acid sequence having 75% or more amino acid sequence identity (e.g., 80% or more, 85% or more, 90% or more, 95% or more, 98% or more, or 100%, amino acid sequence identity) to SYNZIP18 (the amino acid sequence set forth in SEQ ID NO: 1558).

[0207] In some cases, one member of a non-inducible binding pair includes an amino acid sequence having 75% or more amino acid sequence identity (e.g., 80% or more, 85% or more, 90% or more, 95% or more, 98% or more, or 100%, amino acid sequence identity) to SYNZIP17 (the amino acid sequence set forth in SEQ ID NO: 1557); and the other member of the non-inducible binding pair includes an amino acid sequence having 75% or more amino acid sequence identity (e.g., 80% or more, 85% or more, 90% or more, 95% or more, 98% or more, or 100%, amino acid sequence identity) to SYNZIP18 (the amino acid sequence set forth in SEQ ID NO: 1558). For example, in some cases, the two members of a non-inducible binding pair are SYNZIP17 and SYNZIP18.

[0208] In some cases, one member of a non-inducible binding pair includes an amino acid sequence having 75% or more amino acid sequence identity (e.g., 80% or more, 85% or more, 90% or more, 95% or more, 98% or more, or 100%, amino acid sequence identity) to SYNZIP14 (the amino acid sequence set forth in SEQ ID NO: 1556); and the other member of the non-inducible binding pair includes an amino acid sequence having 75% or more amino acid sequence identity (e.g., 80% or more, 85% or more, 90% or more, 95% or more, 98% or more, or 100%, amino acid sequence identity) to SYNZIP17 (the amino acid sequence set forth in SEQ ID NO: 1557). For example, in some cases, the two members of a non-inducible binding pair are SYNZIP14 and SYNZIP17.

[0209] Example dimer pairs suitable for use in a subject Cas9 heterodimer also include inducible binding pairs (binding pairs that can be induced to dimerize, e.g., with a dimerizer, as discussed in more detail below). Dimerizer-binding pairs suitable for use in a Cas9 heterodimer of the present disclosure are in some embodiments polypeptides (e.g. protein domains) that bind to a different site of the same molecule (referred to herein as a “dimerizer”). In the presence of a dimerizer, both members of a dimerizer-binding pair bind to the dimerizer (e.g., in some cases each binding to a different site of the dimerizer) and are thus brought into proximity with one another. This can also be referred to as chemically-inducible dimerization (CID) (e.g., see DeRose et al, Pflugers Arch. 2013 March; 465(3):409-17, which is hereby incorporated by reference in its entirety). In some embodiments, binding to the dimerizer is reversible. In some embodiments, binding to the dimerizer is irreversible. In some embodiments, binding to the dimerizer is non-covalent. In some embodiments, binding to the dimerizer is covalent.

[0210] Dimer pairs suitable for use include dimerizer-binding pairs that dimerize upon binding of a first member of a dimer pair to a dimerizing agent and of a second member of the dimer pair to the same dimerizing agent. Dimer pairs suitable for use also include dimerizer-binding pairs that dimerize upon binding of a first member of a dimer pair to a dimerizing agent, where the dimerizing agent induces a conformational change in the first member of the dimer pair, and where the conformational change allows the first member of the dimer pair to bind (covalently or non-covalently) to a second member of the dimer pair. Other dimer pairs suitable for use include dimer pairs in which exposure to light (e.g., blue light) induces dimerization of the dimer pair.

[0211] Regardless of the mechanism, an inducible dimer pair will dimerize upon exposure to an agent that induces dimerization, where the agent is in some cases a small molecule, or, for example, in other cases, light. Thus, for simplicity, the discussion below referring to “dimerizer-binding pairs” includes dimer pairs that dimerize regardless of the mechanism.

[0212] Non-limiting examples of suitable dimers (e.g., dimerizer-binding pairs) include, but are not limited to:

[0213] (a) FKBP1A (FK506 binding protein) (e.g., a rapamycin binding portion) paired with FKBP1A (e.g., a rapamycin binding portion): dimerization induced by rapamycin and/or rapamycin analogs known as rapalogs;

[0214] (b) FKBP1A (e.g., a rapamycin binding portion) and FRB (Fkbp-Rapamycin Binding Domain): dimerization induced by rapamycin and/or rapamycin analogs known as rapalogs;

[0215] (c) FKBP1A (e.g., a rapamycin binding portion) and CnA (calcineurin catalytic subunit A): dimerization induced by rapamycin and/or rapamycin analogs known as rapalogs;

[0216] (d) FKBP1A (e.g., a rapamycin binding portion) and cyclophilin: dimerization induced by rapamycin and/or rapamycin analogs known as rapalogs;

[0217] (e) GyrB (Gyrase B) and GyrB: dimerization induced by coumermycin;

[0218] (f) DHFR (dihydrofolate reductase) and DHFR: dimerization induced by methotrexate);

[0219] (g) DmrB and DmrB: dimerization induced by AP20187;

[0220] (h) PYL and ABI: dimerization induced by abscisic acid;

[0221] (i) Cry2 and CIB1: dimerization induced by blue light; and

[0222] (j) GAI and GID1: dimerization induced by gibberellin.

[0223] A member (a first and/or a second member) of a binding pair (e.g., a dimerizer-binding pair) of a subject Cas9 heterodimer can have a length in a range of from 35 to 300 amino acids (e.g., from 35 to 250, from 35 to 200, from 35 to 150, from 35 to 100, from 35 to 50, from 50 to 300, from 50 to 250, from 50 to 200, from 50 to 150, from 50 to 100, from 100 to 300, from 100 to 250, from 100 to 200, from 100 to 150, from 150 to 300, from 150 to 250, from 150 to 200, from 200 to 300, from 200 to 250, or from 250 to 300 amino acids).

[0224] In some cases, a member of a dimer (e.g., a dimerizer-binding pair) of a subject Cas9 heterodimer is derived from FKBP1A (also known as FKBP12, FKBP1; PKC12; PKC12; PPIASE; FKBP-12; FKBP-1A). For example, a suitable dimerizer-binding pair member can include a rapamycin binding portion of FKBP1A. For example, a suitable dimerizer-binding pair member can comprise an amino acid sequence having 75% or more amino acid sequence identity (e.g., 80% or more, 85% or more, 90% or more, 95% or more, 98% or more, or 100% amino acid sequence identity) to the following amino acid sequence (a rapamycin binding portion of FKBP1A):

(SEQ ID NO: 1559)
GVQVETISPGDGRTFPKRGQTCVVHYTGMLEDGKKFDSSRDRNKPFKFML
GKQEVIRGWEEGVAQMSVGQRAKLTISPDYAYGATGHPGIIPPHATLVFD
VELLKLE.

[0225] In some cases, a member of a dimerizer-binding pair of a Cas9 heterodimer is derived from protein phosphatase 3, catalytic subunit, alpha isozyme (PPP3CA) (also known as “Serine/threonine-protein phosphatase 2B catalytic subunit alpha isoform”; CNA; CALN; CALNA; CALNA1; CCN1; CNA1; PPP2B; “CAM-PRP catalytic subunit”; and “calmodulin-dependent calcineurin A subunit alpha isoform”). For example, a suitable dimerizer-binding pair member can include a binding portion of PPP3CA. For example, a suitable dimerizer-binding pair member can comprise an amino acid sequence having 75% or more amino acid sequence identity (e.g., 80% or more, 85% or more, 90% or more, 95% or more, 98% or more, or 100% amino acid sequence identity) to the following amino acid sequence (PP2Ac domain):

(SEQ ID NO: 1560)
LEESVALRIITEGASILRQEKNLLDIDAPVTVCGDIHGQFFDLMKLFEV
GGSPANTRYLFLGDYVDRGYFSIECVLYLWALKILYPKTLFLLRGNHEC
RHLTEYFTFKQECKIKYSERVYDACMDAFDCLPLAALMNQQFLCVHGGL
SPEINTLDDIRKLDRFKEPPAYGPMCDILWSDPLEDFGNEKTQEHFTHN
TVRGCSYFYSYPAVCEFLQHNNLLSILRAHEAQDAGYRMYRKSQTTGFP
SLITIFSAPNYLDVYNNKAAVLKYENNVMNIRQFNCSPHPYWLPNFM.

[0226] In some cases, a member of a dimer (e.g., a dimerizer-binding pair) is derived from cyclophilin (also known cyclophilin A, PPIA, CYPA, CYPH, PPlase A, etc.). For example, a suitable dimerizer-binding pair member can include a binding portion of cyclophilin. For example, a suitable dimerizer-binding pair member can include an amino acid sequence having 75% or more amino acid sequence identity (e.g., 80% or more, 85% or more, 90% or more, 95% or more, 98% or more, or 100% amino acid sequence identity) to the following amino acid sequence:

(SEQ ID NO: 1561)
MVNPTVFFDIAVDGEPLGRVSFELFADKVPKTAENFRALSTGEKGFGYKG
SCFHRIIPGFMCQGGDFTRHNGTGGKSIYGEKFEDENFILKHTGPGILSM
ANAGPNTNGSQFFICTAKTEWLDGKHVVFGKVKEGMNIVEAMERFGSRNG
KTSKKITIADCGQLE.

[0227] In some cases, a member of a dimer (e.g., a dimerizer-binding pair) is derived from MTOR (also known as FKBP-rapamycin associated protein; FK506 binding protein 12-rapamycin associated protein 1; FK506 binding protein 12-rapamycin associated protein 2; FK506-binding protein 12-rapamycin complex-associated protein 1; FRAP; FRAP1; FRAP2; RAFT1; and RAPT1). For example, a suitable dimerizer-binding pair member can include the Fkbp-Rapamycin Binding Domain (also known as FRB). For example, a suitable dimerizer-binding pair member can include an amino acid sequence having 75% or more amino acid sequence identity (e.g., 80% or more, 85% or more, 90% or more, 95% or more, 98% or more, or 100% amino acid sequence identity) to the following amino acid sequence (FRB):

(SEQ ID NO: 1562)
VAILWHEMWHEGLEEASRLYFGERNVKGMFEVLEPLHAMMERGPQTLKET
SFNQAYGRDLMEAQEWCRKYMKSGNVKDLTQAWDLYYHVFRRIS.

[0228] In some cases, a member of a dimer (e.g., a dimerizer-binding pair) is derived from GyrB (also known as DNA gyrase subunit B). For example, a suitable dimerizer-binding pair member can include an amino acid sequence having 75% or more amino acid sequence identity (e.g., 80% or more, 85% or more, 90% or more, 95% or more, 98% or more, or 100% amino acid sequence identity) to a contiguous stretch of from about 100 amino acids to about 200 amino acids (aa), from about 200 aa to about 300 aa, from about 300 aa to about 400 aa, from about 400 aa to about 500 aa, from about 500 aa to about 600 aa, from about 600 aa to about 700 aa, or from about 700 aa to about 800 aa, of the following GyrB amino acid sequence from Escherichia coli (or to the DNA gyrase subunit B sequence from any organism):

(SEQ ID NO: 1563)
MSNSYDSSSIKVLKGLDAVRKRPGMYIGDTDDGTGLHHMVFEVVDNAIDE
ALAGHCKEIIVTIHADNSVSVQDDGRGIPTGIHPEEGVSAAEVIMTVLHA
GGKFDDNSYKVSGGLHGVGVSVVNALSQKLELVIQREGKIHRQIYEHGVP
QAPLAVTGETEKTGTMVRFWPSLETFTNVTEFEYEILAKRLRELSFLNSG
VSIRLRDKRDGKEDHFHYEGGIKAFVEYLNKNKTPIHPNIFYFSTEKDGI
GVEVALQWNDGFQENIYCFTNNIPQRDGGTHLAGFRAAMTRTLNAYMDKE
GYSKKAKVSATGDDAREGLIAVVSVKVPDPKFSSQTKDKLVSSEVKSAVE
QQMNELLAEYLLENPTDAKIVVGKIIDAARAREAARRAREMTRRKGALDL
AGLPGKLADCQERDPALSELYLVEGDSAGGSAKQGRNRKNQAILPLKGKI
LNVEKARFDKMLSSQEVATLITALGCGIGRDEYNPDKLRYHSIIIMTDAD
VDGSHIRTLLLTFFYRQMPEIVERGHVYIAQPPLYKVKKGKQEQYIKDDE
AMDQYQISIALDGATLHTNASAPALAGEALEKLVSEYNATQKMINRMERR
YPKAMLKELIYQPTLTEADLSDEQTVTRWVNALVSELNDKEQHGSQWKFD
VHTNAEQNLFEPIVRVRTHGVDTDYPLDHEFITGGEYRRICTLGEKLRGL
LEEDAFIERGERRQPVASFEQALDWLVKESRRGLSIQRYKGLGEMNPEQL
WETTMDPESRRMLRVTVKDAIAADQLFTTLMGDAVEPRRAFIEENALKAA
NIDI.

In some cases, a member of a dimerizer-binding pair includes an amino acid sequence having 75% or more amino acid sequence identity (e.g., 80% or more, 85% or more, 90% or more, 95% or more, 98% or more, or 100% amino acid sequence identity) to amino acids 1-220 of the above-listed GyrB amino acid sequence from Escherichia coli.

[0229] In some cases, a member of a dimer (e.g., a dimerizer-binding pair) is derived from DHFR (also known as dihydrofolate reductase, DHFRP1, and DYR). For example, a suitable dimerizer-binding pair member can include an amino acid sequence having 75% or more amino acid sequence identity (e.g., 80% or more, 85% or more, 90% or more, 95% or more, 98% or more, or 100% amino acid sequence identity) to the following amino acid sequence:

(SEQ ID NO: 1564)
MVGSLNCIVAVSQNMGIGKNGDLPWPPLRNEFRYFQRMTTTSSVEGKQNL
VIMGKKTWFSIPEKNRPLKGRINLVLSRELKEPPQGAHFLSRSLDDALKL
TEQPELANKVDMVWIVGGSSVYKEAMNHPGHLKLFVTRIMQDFESDTFFP
EIDLEKYKLLPEYPGVLSDVQEEKGIKYKFEVYEKND.

[0230] In some cases, a member of a dimer (e.g., a dimerizer-binding pair) is derived from the DmrB binding domain (i.e., DmrB homodimerization domain). For example, a suitable dimerizer-binding pair member can include an amino acid sequence having 75% or more amino acid sequence identity (e.g., 80% or more, 85% or more, 90% or more, 95% or more, 98% or more, or 100% amino acid sequence identity) to the following amino acid sequence:

(SEQ ID NO: 1565)
MASRGVQVETISPGDGRTFPKRGQTCVVHYTGMLEDGKKVDSSRDRNKPF
KFMLGKQEVIRGWEEGVAQMSVGQRAKLTISPDYAYGATGHPGIIPPHAT
LVFDVELLKLE.

[0231] In some cases, a member of a dimer (e.g., a dimerizer-binding pair) is derived from a PYL protein (also known as abscisic acid receptor and as RCAR). For example a member of a subject dimerizer-binding pair can be derived from proteins such as those of Arabidopsis thaliana: PYR1, RCAR1(PYL9), PYL1, PYL2, PYL3, PYL4, PYL5, PYL6, PYL7, PYL8 (RCAR3), PYL10, PYL11, PYL12, PYL13. For example, a suitable dimerizer-binding pair member can include an amino acid sequence having 75% or more amino acid sequence identity (e.g., 80% or more, 85% or more, 90% or more, 95% or more, 98% or more, or 100% amino acid sequence identity) to the following amino acid sequences:

PYL10:
(SEQ ID NO: 1566)
MNGDETKKVESEYIKKHHRHELVESQCSSTLVKHIKAPLHLVWSIVRRFD
EPQKYKPFISRCVVQGKKLEVGSVREVDLKSGLPATKSTEVLEILDDNEH
ILGIRIVGGDHRLKNYSSTISLHSETIDGKTGTLAIESFVVDVPEGNTKE
ETCFFVEALIQCNLNSLADVTERLQAESMEKKI.
PYL11:
(SEQ ID NO: 1567)
METSQKYHTCGSTLVQTIDAPLSLVWSILRRFDNPQAYKQFVKTCNLSSG
DGGEGSVREVTVVSGLPAEFSRERLDELDDESHVMMISIIGGDHRLVNYR
SKTMAFVAADTEEKTVVVESYVVDVPEGNSEEETTSFADTIVGFNLKSLA
KLSERVAHLKL
PYL12:
(SEQ ID NO: 1568)
MKTSQEQHVCGSTVVQTINAPLPLVWSILRRFDNPKTFKHFVKTCKLRSG
DGGEGSVREVTVVSDLPASFSLERLDELDDESHVMVISIIGGDHRLVNYQ
SKTTVFVAAEEEKTVVVESYVVDVPEGNTEEETTLFADTIVGCNLRSLAK
LSEKMMELT.
PYL13:
(SEQ ID NO: 1569)
MESSKQKRCRSSVVETIEAPLPLVWSILRSFDKPQAYQRFVKSCTMRSGG
GGGKGGEGKGSVRDVTLVSGFPADFSTERLEELDDESHVMVVSIIGGNHR
LVNYKSKTKVVASPEDMAKKTVVVESYVVDVPEGTSEEDTIFFVDNIIRY
NLTSLAKLTKKMMK.
PYL1:
(SEQ ID NO: 1570)
MANSESSSSPVNEEENSQRISTLHHQTMPSDLTQDEFTQLSQSIAEFHTY
QLGNGRCSSLLAQRIHAPPETVWSVVRRFDRPQIYKHFIKSCNVSEDFEM
RVGCTRDVNVISGLPANTSRERLDLLDDDRRVTGFSITGGEHRLRNYKSV
TTVHRFEKEEEEERIWTVVLESYVVDVPEGNSEEDTRLFADTVIRLNLQK
LASITEAMNRNNNNNNSSQVR.
PYL2:
(SEQ ID NO: 1571)
MSSSPAVKGLTDEEQKTLEPVIKTYHQFEPDPTTCTSLITQRIHAPASVV
WPLIRRFDNPERYKHFVKRCRLISGDGDVGSVREVTVISGLPASTSTERL
EFVDDDHRVLSFRVVGGEHRLKNYKSVTSVNEFLNQDSGKVYTVVLESYT
VDIPEGNTEEDTKMFVDTVVKLNLQKLGVAATSAPMHDDE.
PYL3:
(SEQ ID NO:1572)
MNLAPIHDPSSSSTTTTSSSTPYGLTKDEFSTLDSIIRTHHTFPRSPNTC
TSLIAHRVDAPAHAIWRFVRDFANPNKYKHFIKSCTIRVNGNGIKEIKVG
TIREVSVVSGLPASTSVEILEVLDEEKRILSFRVLGGEHRLNNYRSVTSV
NEFVVLEKDKKKRVYSVVLESYIVDIPQGNTEEDTRMFVDTVVKSNLQNL
AVISTASPT.
PYL4:
(SEQ ID NO: 1573)
MLAVHRPSSAVSDGDSVQIPMMIASFQKRFPSLSRDSTAARFHTHEVGPN
QCCSAVIQEISAPISTVWSVVRRFDNPQAYKHFLKSCSVIGGDGDNVGSL
RQVHVVSGLPAASSTERLDILDDERHVISFSVVGGDHRLSNYRSVTTLHP
SPISGTVVVESYVVDVPPGNTKEETCDFVDVIVRCNLQSLAKIAENTAAE
SKKKMSL.
PYL5:
(SEQ ID NO: 1574)
MRSPVQLQHGSDATNGFHTLQPHDQTDGPIKRVCLTRGMHVPEHVAMHHT
HDVGPDQCCSSVVQMIHAPPESVWALVRRFDNPKVYKNFIRQCRIVQGDG
LHVGDLREVMVVSGLPAVSSTERLEILDEERHVISFSVVGGDHRLKNYRS
VTTLHASDDEGTVVVESYIVDVPPGNTEEETLSFVDTIVRCNLQSLARST
NRQ.
PYL6:
(SEQ ID NO: 1575)
MPTSIQFQRSSTAAEAANATVRNYPHHHQKQVQKVSLTRGMADVPEHVEL
SHTHVVGPSQCFSVVVQDVEAPVSTVWSILSRFEHPQAYKHFVKSCHVVI
GDGREVGSVREVRVVSGLPAAFSLERLEIMDDDRHVISFSVVGGDHRLMN
YKSVTTVHESEEDSDGKKRTRVVESYVVDVPAGNDKEETCSFADTIVRCN
LQSLAKLAENTSKFS.
PYL7:
(SEQ ID NO: 1576)
MEMIGGDDTDTEMYGALVTAQSLRLRHLHHCRENQCTSVLVKYIQAPVHL
VWSLVRRFDQPQKYKPFISRCTVNGDPEIGCLREVNVKSGLPATTSTERL
EQLDDEEHILGINIIGGDHRLKNYSSILTVHPEMIDGRSGTMVMESFVVD
VPQGNTKDDTCYFVESLIKCNLKSLACVSERLAAQDITNSIATFCNASNG
YREKNHTETNL.
PYL8:
(SEQ ID NO: 1577)
MEANGIENLTNPNQEREFIRRHHKHELVDNQCSSTLVKHINAPVHIVWSL
VRRFDQPQKYKPFISRCVVKGNMEIGTVREVDVKSGLPATRSTERLELLD
DNEHILSIRIVGGDHRLKNYSSIISLHPETIEGRIGTLVIESFVVDVPEG
NTKDETCYFVEALIKCNLKSLADISERLAVQDTTESRV.
PYL9:
(SEQ ID NO: 1578)
MMDGVEGGTAMYGGLETVQYVRTHHQHLCRENQCTSALVKHIKAPLHLVW
SLVRRFDQPQKYKPFVSRCTVIGDPEIGSLREVNVKSGLPATTSTERLEL
LDDEEHILGIKIIGGDHRLKNYSSILTVHPEIIEGRAGTMVIESFVVDVP
QGNTKDETCYFVEALIRCNLKSLADVSERLASQDITQ.
PYR1:
(SEQ ID NO: 1579)
MPSELTPEERSELKNSIAEFHTYQLDPGSCSSLHAQRIHAPPELVWSIVR
RFDKPQTYKHFIKSCSVEQNFEMRVGCTRDVIVISGLPANTSTERLDILD
DERRVTGFSIIGGEHRLTNYKSVTTVHRFEKENRIWTVVLESYVVDMPEG
NSEDDTRMFADTVVKLNLQKLATVAEAMARNSGDGSGSQVT.

[0232] In some cases, a member of a dimer (e.g., a dimerizer-binding pair) is derived from an ABI protein (also known as Abscisic Acid-Insensitive). For example a member of a subject dimerizer-binding pair can be derived from proteins such as those of Arabidopsis thaliana: ABI1 (Also known as ABSCISIC ACID-INSENSITIVE 1, Protein phosphatase 2C 56, AtPP2C56, P2C56, and PP2C ABI1) and/or ABI2(also known as P2C77, Protein phosphatase 2C 77, AtPP2C77, ABSCISIC ACID-INSENSITIVE 2, Protein phosphatase 2C ABI2, and PP2C ABI2). For example, a suitable dimerizer-binding pair member can include an amino acid sequence having 75% or more amino acid sequence identity (e.g., 80% or more, 85% or more, 90% or more, 95% or more, 98% or more, or 100% amino acid sequence identity) to a contiguous stretch of from about 100 amino acids to about 110 amino acids (aa), from about 110 aa to about 115 aa, from about 115 aa to about 120 aa, from about 120 aa to about 130 aa, from about 130 aa to about 140 aa, from about 140 aa to about 150 aa, from about 150 aa to about 160 aa, from about 160 aa to about 170 aa, from about 170 aa to about 180 aa, from about 180 aa to about 190 aa, or from about 190 aa to about 200 aa of any of the following amino acid sequences:

ABI1:
(SEQ ID NO: 1580)
MEEVSPAIAGPFRPFSETQMDFTGIRLGKGYCNNQYSNQDSENGDLMVSL
PETSSCSVSGSHGSESRKVLISRINSPNLNMKESAAADIVVVDISAGDEI
NGSDITSEKKMISRTESRSLFEFKSVPLYGFTSICGRRPEMEDAVSTIPR
FLQSSSGSMLDGRFDPQSAAHFFGVYDGHGGSQVANYCRERMHLALAEEI
AKEKPMLCDGDTWLEKWKKALFNSFLRVDSEIESVAPETVGSTSVVAVVF
PSHIFVANCGDSRAVLCRGKTALPLSVDHKPDREDEAARIEAAGGKVIQW
NGARVFGVLAMSRSIGDRYLKPSIIPDPEVTAVKRVKEDDCLILASDGVW
DVMTDEEACEMARKRILLWHKKNAVAGDASLLADERRKEGKDPAAMSAAE
YLSKLAIQRGSKDNISVVVVDLKPRRKLKSKPLN.
ABI2:
(SEQ ID NO: 1581)
MDEVSPAVAVPFRPFTDPHAGLRGYCNGESRVTLPESSCSGDGAMKDSSF
EINTRQDSLTSSSSAMAGVDISAGDEINGSDEFDPRSMNQSEKKVLSRTE
SRSLFEFKCVPLYGVTSICGRRPEMEDSVSTIPRFLQVSSSSLLDGRVTN
GFNPHLSAHFFGVYDGHGGSQVANYCRERMHLALTEEIVKEKPEFCDGDT
WQEKWKKALFNSFMRVDSEIETVAHAPETVGSTSVVAVVFPTHIFVANCG
DSRAVLCRGKTPLALSVDHKPDRDDEAARIEAAGGKVIRWNGARVFGVLA
MSRSIGDRYLKPSVIPDPEVTSVRRVKEDDCLILASDGLWDVMTNEEVCD
LARKRILLWHKKNAMAGEALLPAEKRGEGKDPAAMSAAEYLSKMALQKGS
KDNISVVVVDLKGIRKFKSKSLN.

[0233] In some cases, a member of a dimer (e.g., a dimerizer-binding pair) is derived from a Cry2 protein (also known as cryptochrome 2). For example a member of a subject dimer (e.g., a dimerizer-binding pair) can be derived from Cry2 proteins from any organism (e.g., a plant) such as, but not limited to, those of Arabidopsis thaliana. For example, a suitable dimerizer-binding pair member can include an amino acid sequence having 75% or more amino acid sequence identity (e.g., 80% or more, 85% or more, 90% or more, 95% or more, 98% or more, or 100% amino acid sequence identity) to a contiguous stretch of from about 100 amino acids to about 110 amino acids (aa), from about 110 aa to about 115 aa, from about 115 aa to about 120 aa, from about 120 aa to about 130 aa, from about 130 aa to about 140 aa, from about 140 aa to about 150 aa, from about 150 aa to about 160 aa, from about 160 aa to about 170 aa, from about 170 aa to about 180 aa, from about 180 aa to about 190 aa, or from about 190 aa to about 200 aa of any of the following amino acid sequences:

Cry2 (Arabidopsis thaliana)
(SEQ ID NO: 1582)
MKMDKKTIVWFRRDLRIEDNPALAAAAHEGSVFPVFIWCPEEEGQFYPG
RASRWWMKQSLAHLSQSLKALGSDLTLIKTHNTISAILDCIRVTGATKV
VFNHLYDPVSLVRDHTVKEKLVERGISVQSYNGDLLYEPWEIYCEKGKP
FTSFNSYWKKCLDMSIESVMLPPPWRLMPITAAAEAIWACSIEELGLEN
EAEKPSNALLTRAWSPGWSNADKLLNEFIEKQLIDYAKNSKKVVGNSTS
LLSPYLHFGEISVRHVFQCARMKQIIWARDKNSEGEESADLFLRGIGLR
EYSRYICFNFPFTHEQSLLSHLRFFPWDADVDKFKAWRQGRTGYPLVDA
GMRELWATGWMHNRIRVIVSSFAVKFLLLPWKWGMKYFWDTLLDADLEC
DILGWQYISGSIPDGHELDRLDNPALQGAKYDPEGEYIRQWLPELARLP
TEWIHHPWDAPLTVLKASGVELGTNYAKPIVDIDTARELLAKAISRTRE
AQIMIGAAPDEIVADSFEALGANTIKEPGLCPSVSSNDQQVPSAVRYNG
SKRVKPEEEEERDMKKSRGFDERELFSTAESSSSSSVFFVSQSCSLASE
GKNLEGIQDSSDQITTSLGKNGCK.

[0234] In some cases, a member of a dimer (e.g., a dimerizer-binding pair) is derived from the CIB1 Arabidopsis thaliana protein (also known as transcription factor bHLH63). For example, a suitable dimer (e.g., a dimerizer-binding pair) member can include an amino acid sequence having 75% or more amino acid sequence identity (e.g., 80% or more, 85% or more, 90% or more, 95% or more, 98% or more, or 100% amino acid sequence identity) to a contiguous stretch of from about 100 amino acids to about 110 amino acids (aa), from about 110 aa to about 115 aa, from about 115 aa to about 120 aa, from about 120 aa to about 130 aa, from about 130 aa to about 140 aa, from about 140 aa to about 150 aa, from about 150 aa to about 160 aa, from about 160 aa to about 170 aa, from about 170 aa to about 180 aa, from about 180 aa to about 190 aa, or from about 190 aa to about 200 aa of the following amino acid sequence:

(SEQ ID NO: 1583)
MNGAIGGDLLLNFPDMSVLERQRAHLKYLNPTFDSPLAGFFADSSMITGG
EMDSYLSTAGLNLPMMYGETTVEGDSRLSISPETTLGTGNFKKRKFDTET
KDCNEKKKKMTMNRDDLVEEGEEEKSKITEQNNGSTKSIKKMKHKAKKEE
NNFSNDSSKVTKELEKTDYIHVRARRGQATDSHSIAERVRREKISERMKF
LQDLVPGCDKITGKAGMLDEIINYVQSLQRQIEFLSMKLAIVNPRPDFDM
DDIFAKEVASTPMTVVPSPEMVLSGYSHEMVHSGYSSEMVNSGYLHVNPM
QQVNTSSDPLSCFNNGEAPSMWDSHVQNLYGNLGV.

[0235] In some cases, a member of a dimer (e.g., a dimerizer-binding pair) is derived from the GAI Arabidopsis thaliana protein (also known as Gibberellic Acid Insensitive, and DELLA protein GAI). For example, a suitable dimerizer-binding pair member can include an amino acid sequence having 75% or more amino acid sequence identity (e.g., 80% or more, 85% or more, 90% or more, 95% or more, 98% or more, or 100% amino acid sequence identity) to a contiguous stretch of from about 100 amino acids to about 110 amino acids (aa), from about 110 aa to about 115 aa, from about 115 aa to about 120 aa, from about 120 aa to about 130 aa, from about 130 aa to about 140 aa, from about 140 aa to about 150 aa, from about 150 aa to about 160 aa, from about 160 aa to about 170 aa, from about 170 aa to about 180 aa, from about 180 aa to about 190 aa, or from about 190 aa to about 200 aa of the following amino acid sequence:

(SEQ ID NO: 1584)
MKRDHHHHHHQDKKTMMMNEEDDGNGMDELLAVLGYKVRSSEMADVAQKL
EQLEVMMSNVQEDDLSQLATETVHYNPAELYTWLDSMLTDLNPPSSNAEY
DLKAIPGDAILNQFAIDSASSSNQGGGGDTYTTNKRLKCSNGVVETTTAT
AESTRHVVLVDSQENGVRLVHALLACAEAVQKENLTVAEALVKQIGFLAV
SQIGAMRKVATYFAEALARRIYRLSPSQSPIDHSLSDTLQMHFYETCPYL
KFAHFTANQAILEAFQGKKRVHVIDFSMSQGLQWPALMQALALRPGGPPV
FRLTGIGPPAPDNFDYLHEVGCKLAHLAEAIHVEFEYRGFVANTLADLDA
SMLELRPSEIESVAVNSVFELHKLLGRPGAIDKVLGVVNQIKPEIFTVVE
QESNHNSPIFLDRFTESLHYYSTLFDSLEGVPSGQDKVMSEVYLGKQICN
VVACDGPDRVERHETLSQWRNRFGSAGFAAAHIGSNAFKQASMLLALFNG
GEGYRVEESDGCLMLGWHTRPLIATSAWKLSTN.

[0236] In some cases, a member of a dimer (e.g., a dimerizer-binding pair) is derived from a GID1 Arabidopsis thaliana protein (also known as Gibberellin receptor GID1). For example, a suitable dimer member can include an amino acid sequence having 75% or more amino acid sequence identity (e.g., 80% or more, 85% or more, 90% or more, 95% or more, 98% or more, or 100% amino acid sequence identity) to a contiguous stretch of from about 100 amino acids to about 110 amino acids (aa), from about 110 aa to about 115 aa, from about 115 aa to about 120 aa, from about 120 aa to about 130 aa, from about 130 aa to about 140 aa, from about 140 aa to about 150 aa, from about 150 aa to about 160 aa, from about 160 aa to about 170 aa, from about 170 aa to about 180 aa, from about 180 aa to about 190 aa, or from about 190 aa to about 200 aa of any of the following amino acid sequences:

GID1A:
(SEQ ID NO: 1585)
MAASDEVNLIESRTVVPLNTWVLISNFKVAYNILRRPDGTFNRHLAEYLD
RKVTANANPVDGVFSFDVLIDRRINLLSRVYRPAYADQEQPPSILDLEKP
VDGDIVPVILFFHGGSFAHSSANSAIYDTLCRRLVGLCKCVVVSVNYRRA
PENPYPCAYDDGWIALNWVNSRSWLKSKKDSKVHIFLAGDSSGGNIAHNV
ALRAGESGIDVLGNILLNPMFGGNERTESEKSLDGKYFVTVRDRDWYWKA
FLPEGEDREHPACNPFSPRGKSLEGVSFPKSLVVVAGLDLIRDWQLAYAE
GLKKAGQEVKLMHLEKATVGFYLLPNNNHFHNVMDEISAFVNAEC.
GID1B:
(SEQ ID NO: 1586)
MAGGNEVNLNECKRIVPLNTWVLISNFKLAYKVLRRPDGSFNRDLAEFLD
RKVPANSFPLDGVFSFDHVDSTTNLLTRIYQPASLLHQTRHGTLELTKPL
STTEIVPVLIFFHGGSFTHSSANSAIYDTFCRRLVTICGVVVVSVDYRRS
PEHRYPCAYDDGWNALNWVKSRVWLQSGKDSNVYVYLAGDSSGGNIAHNV
AVRATNEGVKVLGNILLHPMFGGQERTQSEKTLDGKYFVTIQDRDWYWRA
YLPEGEDRDHPACNPFGPRGQSLKGVNFPKSLVVVAGLDLVQDWQLAYVD
GLKKTGLEVNLLYLKQATIGFYFLPNNDHFHCLMEELNKFVHSIEDSQSK
SSPVLLTP
GID1C:
(SEQ ID NO: 1587)
MAGSEEVNLIESKTVVPLNTWVLISNFKLAYNLLRRPDGTFNRHLAEFLD
RKVPANANPVNGVFSFDVIIDRQTNLLSRVYRPADAGTSPSITDLQNPVD
GEIVPVIVFFHGGSFAHSSANSAIYDTLCRRLVGLCGAVVVSVNYRRAPE
NRYPCAYDDGWAVLKWVNSSSWLRSKKDSKVRIFLAGDSSGGNIVHNVAV
RAVESRIDVLGNILLNPMFGGTERTESEKRLDGKYFVTVRDRDWYWRAFL
PEGEDREHPACSPFGPRSKSLEGLSFPKSLVVVAGLDLIQDWQLKYAEGL
KKAGQEVKLLYLEQATIGFYLLPNNNHFHTVMDEIAAFVNAECQ.

[0237] Dimerizers

[0238] Dimerizers (“dimerizing agents”) that can provide for dimerization of a first member of a dimerizer-binding pair and a second member of a dimerizer-binding pair include, e.g. (where the dimerizer is in parentheses following the dimerizer-binding pair):

[0239] a) FKBP1A and FKBP1A (rapamycin and/or a rapamycin analog, rapalog);

[0240] b) FKBP1A and FRB (rapamycin and/or a rapamycin analog, rapalog);

[0241] c) FKBP1A and PPP3CA (rapamycin and/or a rapamycin analog, rapalog);

[0242] d) FKBP1A and cyclophilin (rapamycin and/or a rapamycin analog, rapalog);

[0243] e) GyrB and GyrB (coumermycin);

[0244] f) DHFR and DHFR (methotrexate);

[0245] g) DmrB and DmrB (AP20187);

[0246] h) PYL and ABI (abscisic acid);

[0247] i) Cry2 and CIB1 (blue light); and

[0248] j) GAI and GID1 (gibberellin).

[0249] As noted above, rapamycin can serve as a dimerizer. Alternatively, a rapamycin derivative or analog can be used. See, e.g., WO96/41865; WO 99/36553; WO 01/14387; and Ye et al (1999) Science 283:88-91. For example, analogs, homologs, derivatives and other compounds related structurally to rapamycin (“rapalogs”) include, among others, variants of rapamycin having one or more of the following modifications relative to rapamycin: demethylation, elimination or replacement of the methoxy at C7, C42 and/or C29; elimination, derivatization or replacement of the hydroxy at C13, C43 and/or C28; reduction, elimination or derivatization of the ketone at C14, C24 and/or C30; replacement of the 6-membered pipecolate ring with a 5-membered prolyl ring; and alternative substitution on the cyclohexyl ring or replacement of the cyclohexyl ring with a substituted cyclopentyl ring. Additional information is presented in, e.g., U.S. Pat. Nos. 5,525,610; 5,310,903 5,362,718; and 5,527,907. Selective epimerization of the C-28 hydroxyl group has been described; see, e.g., WO 01/14387. Additional synthetic dimerizing agents suitable for use as an alternative to rapamycin include those described in U.S. Patent Publication No. 2012/0130076.

[0250] Rapamycin has the structure:

[chemical structure]

[0251] Suitable rapalogs include, e.g.,

[chemical structure]

[0252] Also suitable as a rapalog is a compound of the formula:

[chemical structure]

[0253] where n is 1 or 2; R²⁸ and R⁴³ are independently H, or a substituted or unsubstituted aliphatic or acyl moiety; one of R^{7a} and R^{7b} is H and the other is halo, R^{A}, OR^{A}, SR^{A}, —OC(O)R^{A}, —OC(O)NR^{A}R^{B}, —NR^{A}R^{B}, —NR^{B}C(OR)R^{A}, NR^{B}C(O)R^{A}, —NR^{B}SO₂R^{A}, or NR^{B}SO₂NR^{A}R^{B}′; or R^{7a} and R^{7b}, taken together, are H in the tetraene moiety:

[chemical structure]

[0254] where R^{A} is H or a substituted or unsubstituted aliphatic, heteroaliphatic, aryl, or heteroaryl moiety and where R^{B} and R^{B}′ are independently H, OH, or a substituted or unsubstituted aliphatic, heteroaliphatic, aryl, or heteroaryl moiety.

[0255] As noted above, coumermycin can serve as a dimerizing agent. Alternatively, a coumermycin analog can be used. See, e.g., Farrar et al. (1996) Nature 383:178-181; and U.S. Pat. No. 6,916,846.

[0256] As noted above, in some cases, the dimerizing agent is methotrexate, e.g., a non-cytotoxic, homo-bifunctional methotrexate dimer. See, e.g., U.S. Pat. No. 8,236,925.

[0257] Examples of Cas9 Heterodimers

[0258] In some embodiments, a Cas9 heterodimer of the present disclosure comprises: A) a first fusion polypeptide comprising: a) a first polypeptide comprising: i) a RuvCI polypeptide; ii) a RuvCII polypeptide; iii) an HNH polypeptide; iv) a RuvCIII polypeptide; and v) a PAM-interacting polypeptide; and b) a first fusion partner, where the first fusion partner is a first member of a dimerization pair; and B) a second fusion polypeptide comprising: a) an alpha-helical recognition region; and b) a second fusion partner, where the second fusion partner is a second member of a dimerization pair.

[0259] In some embodiments, a Cas9 heterodimer of the present disclosure comprises: A) a first fusion polypeptide comprising: a) a first polypeptide comprising: i) a RuvCI polypeptide; ii) a RuvCII polypeptide; iii) an HNH polypeptide; iv) a RuvCIII polypeptide; and v) a PAM-interacting polypeptide; and b) a first fusion partner, where the first fusion partner is an FKBP1A polypeptide; and B) a second fusion polypeptide comprising: a) an alpha-helical recognition region; and b) a second fusion partner, where the second fusion partner is an FKBP1A polypeptide.

[0260] In some embodiments, a Cas9 heterodimer of the present disclosure comprises: A) a first fusion polypeptide comprising: a) a first polypeptide comprising: i) a RuvCI polypeptide; ii) a RuvCII polypeptide; iii) an HNH polypeptide; iv) a RuvCIII polypeptide; and v) a PAM-interacting polypeptide; and b) a first fusion partner, where the first fusion partner is an FKBP1A polypeptide; and B) a second fusion polypeptide comprising: a) an alpha-helical recognition region; and b) a second fusion partner, where the second fusion partner is an FRB polypeptide. In some embodiments, a Cas9 heterodimer of the present disclosure comprises: A) a first fusion polypeptide comprising: a) a first polypeptide comprising: i) a RuvCI polypeptide; ii) a RuvCII polypeptide; iii) an HNH polypeptide; iv) a RuvCIII polypeptide; and v) a PAM-interacting polypeptide; and b) a first fusion partner, where the first fusion partner is an FRB polypeptide; and B) a second fusion polypeptide comprising: a) an alpha-helical recognition region; and b) a second fusion partner, where the second fusion partner is an FKBP1A polypeptide.

[0261] In some embodiments, a Cas9 heterodimer of the present disclosure comprises: A) a first fusion polypeptide comprising: a) a first polypeptide comprising: i) a RuvCI polypeptide; ii) a RuvCII polypeptide; iii) an HNH polypeptide; iv) a RuvCIII polypeptide; and v) a PAM-interacting polypeptide; and b) a first fusion partner, where the first fusion partner is an FKBP1A polypeptide; and B) a second fusion polypeptide comprising: a) an alpha-helical recognition region; and b) a second fusion partner, where the second fusion partner is a PPP3CA polypeptide. In some embodiments, a Cas9 heterodimer of the present disclosure comprises: A) a first fusion polypeptide comprising: a) a first polypeptide comprising: i) a RuvCI polypeptide; ii) a RuvCII polypeptide; iii) an HNH polypeptide; iv) a RuvCIII polypeptide; and v) a PAM-interacting polypeptide; and b) a first fusion partner, where the first fusion partner is a PPP3CA polypeptide; and B) a second fusion polypeptide comprising: a) an alpha-helical recognition region; and b) a second fusion partner, where the second fusion partner is an FKBP1A polypeptide.

[0262] In some embodiments, a Cas9 heterodimer of the present disclosure comprises: A) a first fusion polypeptide comprising: a) a first polypeptide comprising: i) a RuvCI polypeptide; ii) a RuvCII polypeptide; iii) an HNH polypeptide; iv) a RuvCIII polypeptide; and v) a PAM-interacting polypeptide; and b) a first fusion partner, where the first fusion partner is an FKBP1A polypeptide; and B) a second fusion polypeptide comprising: a) an alpha-helical recognition region; and b) a second fusion partner, where the second fusion partner is a cyclophilin polypeptide. In some embodiments, a Cas9 heterodimer of the present disclosure comprises: A) a first fusion polypeptide comprising: a) a first polypeptide comprising: i) a RuvCI polypeptide; ii) a RuvCII polypeptide; iii) an HNH polypeptide; iv) a RuvCIII polypeptide; and v) a PAM-interacting polypeptide; and b) a first fusion partner, where the first fusion partner is a cyclophilin polypeptide; and B) a second fusion polypeptide comprising: a) an alpha-helical recognition region; and b) a second fusion partner, where the second fusion partner is an FKBP1A polypeptide.

[0263] In some embodiments, a Cas9 heterodimer of the present disclosure comprises: A) a first fusion polypeptide comprising: a) a first polypeptide comprising: i) a RuvCI polypeptide; ii) a RuvCII polypeptide; iii) an HNH polypeptide; iv) a RuvCIII polypeptide; and v) a PAM-interacting polypeptide; and b) a first fusion partner, where the first fusion partner is a GyrB polypeptide; and B) a second fusion polypeptide comprising: a) an alpha-helical recognition region; and b) a second fusion partner, where the second fusion partner is a GyrB polypeptide.

[0264] In some embodiments, a Cas9 heterodimer of the present disclosure comprises: A) a first fusion polypeptide comprising: a) a first polypeptide comprising: i) a RuvCI polypeptide; ii) a RuvCII polypeptide; iii) an HNH polypeptide; iv) a RuvCIII polypeptide; and v) a PAM-interacting polypeptide; and b) a first fusion partner, where the first fusion partner is a DHFR polypeptide; and B) a second fusion polypeptide comprising: a) an alpha-helical recognition region; and b) a second fusion partner, where the second fusion partner is a DHFR polypeptide.

[0265] In some embodiments, a Cas9 heterodimer of the present disclosure comprises: A) a first fusion polypeptide comprising: a) a first polypeptide comprising: i) a RuvCI polypeptide; ii) a RuvCII polypeptide; iii) an HNH polypeptide; iv) a RuvCIII polypeptide; and v) a PAM-interacting polypeptide; and b) a first fusion partner, where the first fusion partner is a DmrB polypeptide; and B) a second fusion polypeptide comprising: a) an alpha-helical recognition region; and b) a second fusion partner, where the second fusion partner is a DmrB polypeptide.

[0266] In some embodiments, a Cas9 heterodimer of the present disclosure comprises: A) a first fusion polypeptide comprising: a) a first polypeptide comprising: i) a RuvCI polypeptide; ii) a RuvCII polypeptide; iii) an HNH polypeptide; iv) a RuvCIII polypeptide; and v) a PAM-interacting polypeptide; and b) a first fusion partner, where the first fusion partner is a PYL polypeptide; and B) a second fusion polypeptide comprising: a) an alpha-helical recognition region; and b) a second fusion partner, where the second fusion partner is an ABI polypeptide. In some embodiments, a Cas9 heterodimer of the present disclosure comprises: A) a first fusion polypeptide comprising: a) a first polypeptide comprising: i) a RuvCI polypeptide; ii) a RuvCII polypeptide; iii) an HNH polypeptide; iv) a RuvCIII polypeptide; and v) a PAM-interacting polypeptide; and b) a first fusion partner, where the first fusion partner is an ABI polypeptide; and B) a second fusion polypeptide comprising: a) an alpha-helical recognition region; and b) a second fusion partner, where the second fusion partner is an PYL polypeptide.

[0267] In some embodiments, a Cas9 heterodimer of the present disclosure comprises: A) a first fusion polypeptide comprising: a) a first polypeptide comprising: i) a RuvCI polypeptide; ii) a RuvCII polypeptide; iii) an HNH polypeptide; iv) a RuvCIII polypeptide; and v) a PAM-interacting polypeptide; and b) a first fusion partner, where the first fusion partner is a Cyr2 polypeptide; and B) a second fusion polypeptide comprising: a) an alpha-helical recognition region; and b) a second fusion partner, where the second fusion partner is a CIB1 polypeptide. In some embodiments, a Cas9 heterodimer of the present disclosure comprises: A) a first fusion polypeptide comprising: a) a first polypeptide comprising: i) a RuvCI polypeptide; ii) a RuvCII polypeptide; iii) an HNH polypeptide; iv) a RuvCIII polypeptide; and v) a PAM-interacting polypeptide; and b) a first fusion partner, where the first fusion partner is a CIB1 polypeptide; and B) a second fusion polypeptide comprising: a) an alpha-helical recognition region; and b) a second fusion partner, where the second fusion partner is an Cry2 polypeptide.

[0268] In some embodiments, a Cas9 heterodimer of the present disclosure comprises: A) a first fusion polypeptide comprising: a) a first polypeptide comprising: i) a RuvCI polypeptide; ii) a RuvCII polypeptide; iii) an HNH polypeptide; iv) a RuvCIII polypeptide; and v) a PAM-interacting polypeptide; and b) a first fusion partner, where the first fusion partner is a GAI polypeptide; and B) a second fusion polypeptide comprising: a) an alpha-helical recognition region; and b) a second fusion partner, where the second fusion partner is a GID1 polypeptide. In some embodiments, a Cas9 heterodimer of the present disclosure comprises: A) a first fusion polypeptide comprising: a) a first polypeptide comprising: i) a RuvCI polypeptide; ii) a RuvCII polypeptide; iii) an HNH polypeptide; iv) a RuvCIII polypeptide; and v) a PAM-interacting polypeptide; and b) a first fusion partner, where the first fusion partner is a GID1 polypeptide; and B) a second fusion polypeptide comprising: a) an alpha-helical recognition region; and b) a second fusion partner, where the second fusion partner is an GAI polypeptide.

[0269] In some cases, a Cas9 heterodimer of the present disclosure comprises: A) a first fusion polypeptide comprising: a) a first, circular permuted, polypeptide that comprises: i) a RuvCI polypeptide; ii) a RuvCII polypeptide; iii) an HNH polypeptide; iv) a RuvCIII polypeptide; and v) a PAM-interacting polypeptide; and b) a first fusion partner, where the first fusion partner is a first member of a dimerization pair; and B) a second fusion polypeptide comprising: a) a second polypeptide that comprises an alpha-helical recognition region; and b) a second fusion partner, where the second fusion partner is a second member of the dimerization pair.

[0270] In some cases, a Cas9 heterodimer of the present disclosure comprises: A) a first fusion polypeptide comprising: a) a first, circular permuted, polypeptide that comprises: i) a RuvCI polypeptide; ii) a RuvCII polypeptide; iii) an HNH polypeptide; iv) a RuvCIII polypeptide; and v) a PAM-interacting polypeptide; and b) a first fusion partner, where the first fusion partner is an FKBP1A polypeptide; and B) a second fusion polypeptide comprising: a) a second polypeptide that comprises an alpha-helical recognition region; and b) a second fusion partner, where the second fusion partner is an FKBP1A polypeptide.

[0271] In some cases, a Cas9 heterodimer of the present disclosure comprises: A) a first fusion polypeptide comprising: a) a first, circular permuted, polypeptide that comprises: i) a RuvCI polypeptide; ii) a RuvCII polypeptide; iii) an HNH polypeptide; iv) a RuvCIII polypeptide; and v) a PAM-interacting polypeptide; and b) a first fusion partner, where the first fusion partner is an FKBP1A polypeptide; and B) a second fusion polypeptide comprising: a) a second polypeptide that comprises an alpha-helical recognition region; and b) a second fusion partner, where the second fusion partner is an FRB polypeptide. In some cases, a Cas9 heterodimer of the present disclosure comprises: A) a first fusion polypeptide comprising: a) a first, circular permuted, polypeptide that comprises: i) a RuvCI polypeptide; ii) a RuvCII polypeptide; iii) an HNH polypeptide; iv) a RuvCIII polypeptide; and v) a PAM-interacting polypeptide; and b) a first fusion partner, where the first fusion partner is an FRB polypeptide; and B) a second fusion polypeptide comprising: a) a second polypeptide that comprises an alpha-helical recognition region; and b) a second fusion partner, where the second fusion partner is an FKBP1A polypeptide.

[0272] In some cases, a Cas9 heterodimer of the present disclosure comprises: A) a first fusion polypeptide comprising: a) a first, circular permuted, polypeptide that comprises: i) a RuvCI polypeptide; ii) a RuvCII polypeptide; iii) an HNH polypeptide; iv) a RuvCIII polypeptide; and v) a PAM-interacting polypeptide; and b) a first fusion partner, where the first fusion partner is an FKBP1A polypeptide; and B) a second fusion polypeptide comprising: a) a second polypeptide that comprises an alpha-helical recognition region; and b) a second fusion partner, where the second fusion partner is a PPP3CA polypeptide. In some cases, a Cas9 heterodimer of the present disclosure comprises: A) a first fusion polypeptide comprising: a) a first, circular permuted, polypeptide that comprises: i) a RuvCI polypeptide; ii) a RuvCII polypeptide; iii) an HNH polypeptide; iv) a RuvCIII polypeptide; and v) a PAM-interacting polypeptide; and b) a first fusion partner, where the first fusion partner is a PPP3CA polypeptide; and B) a second fusion polypeptide comprising: a) a second polypeptide that comprises an alpha-helical recognition region; and b) a second fusion partner, where the second fusion partner is an FKBP1A polypeptide.

[0273] In some cases, a Cas9 heterodimer of the present disclosure comprises: A) a first fusion polypeptide comprising: a) a first, circular permuted, polypeptide that comprises: i) a RuvCI polypeptide; ii) a RuvCII polypeptide; iii) an HNH polypeptide; iv) a RuvCIII polypeptide; and v) a PAM-interacting polypeptide; and b) a first fusion partner, where the first fusion partner is an FKBP1A polypeptide; and B) a second fusion polypeptide comprising: a) a second polypeptide that comprises an alpha-helical recognition region; and b) a second fusion partner, where the second fusion partner is a cyclophilin polypeptide. In some cases, a Cas9 heterodimer of the present disclosure comprises: A) a first fusion polypeptide comprising: a) a first, circular permuted, polypeptide that comprises: i) a RuvCI polypeptide; ii) a RuvCII polypeptide; iii) an HNH polypeptide; iv) a RuvCIII polypeptide; and v) a PAM-interacting polypeptide; and b) a first fusion partner, where the first fusion partner is a cyclophilin polypeptide; and B) a second fusion polypeptide comprising: a) a second polypeptide that comprises an alpha-helical recognition region; and b) a second fusion partner, where the second fusion partner is an FKBP1A polypeptide.

[0274] In some cases, a Cas9 heterodimer of the present disclosure comprises: A) a first fusion polypeptide comprising: a) a first, circular permuted, polypeptide that comprises: i) a RuvCI polypeptide; ii) a RuvCII polypeptide; iii) an HNH polypeptide; iv) a RuvCIII polypeptide; and v) a PAM-interacting polypeptide; and b) a first fusion partner, where the first fusion partner is a GyrB polypeptide; and B) a second fusion polypeptide comprising: a) a second polypeptide that comprises an alpha-helical recognition region; and b) a second fusion partner, where the second fusion partner is a GyrB polypeptide.

[0275] In some cases, a Cas9 heterodimer of the present disclosure comprises: A) a first fusion polypeptide comprising: a) a first, circular permuted, polypeptide that comprises: i) a RuvCI polypeptide; ii) a RuvCII polypeptide; iii) an HNH polypeptide; iv) a RuvCIII polypeptide; and v) a PAM-interacting polypeptide; and b) a first fusion partner, where the first fusion partner is a DHFR polypeptide; and B) a second fusion polypeptide comprising: a) a second polypeptide that comprises an alpha-helical recognition region; and b) a second fusion partner, where the second fusion partner is a DHFR polypeptide.

[0276] In some cases, a Cas9 heterodimer of the present disclosure comprises: A) a first fusion polypeptide comprising: a) a first, circular permuted, polypeptide that comprises: i) a RuvCI polypeptide; ii) a RuvCII polypeptide; iii) an HNH polypeptide; iv) a RuvCIII polypeptide; and v) a PAM-interacting polypeptide; and b) a first fusion partner, where the first fusion partner is a DmrB polypeptide; and B) a second fusion polypeptide comprising: a) a second polypeptide that comprises an alpha-helical recognition region; and b) a second fusion partner, where the second fusion partner is a DmrB polypeptide.

[0277] In some cases, a Cas9 heterodimer of the present disclosure comprises: A) a first fusion polypeptide comprising: a) a first, circular permuted, polypeptide that comprises: i) a RuvCI polypeptide; ii) a RuvCII polypeptide; iii) an HNH polypeptide; iv) a RuvCIII polypeptide; and v) a PAM-interacting polypeptide; and b) a first fusion partner, where the first fusion partner is a PYL polypeptide; and B) a second fusion polypeptide comprising: a) a second polypeptide that comprises an alpha-helical recognition region; and b) a second fusion partner, where the second fusion partner is an ABI polypeptide. In some cases, a Cas9 heterodimer of the present disclosure comprises: A) a first fusion polypeptide comprising: a) a first, circular permuted, polypeptide that comprises: i) a RuvCI polypeptide; ii) a RuvCII polypeptide; iii) an HNH polypeptide; iv) a RuvCIII polypeptide; and v) a PAM-interacting polypeptide; and b) a first fusion partner, where the first fusion partner is an ABI polypeptide; and B) a second fusion polypeptide comprising: a) a second polypeptide that comprises an alpha-helical recognition region; and b) a second fusion partner, where the second fusion partner is a PYL polypeptide.

[0278] In some cases, a Cas9 heterodimer of the present disclosure comprises: A) a first fusion polypeptide comprising: a) a first, circular permuted, polypeptide that comprises: i) a RuvCI polypeptide; ii) a RuvCII polypeptide; iii) an HNH polypeptide; iv) a RuvCIII polypeptide; and v) a PAM-interacting polypeptide; and b) a first fusion partner, where the first fusion partner is a Cry2 polypeptide; and B) a second fusion polypeptide comprising: a) a second polypeptide that comprises an alpha-helical recognition region; and b) a second fusion partner, where the second fusion partner is a CIB1 polypeptide. In some cases, a Cas9 heterodimer of the present disclosure comprises: A) a first fusion polypeptide comprising: a) a first, circular permuted, polypeptide that comprises: i) a RuvCI polypeptide; ii) a RuvCII polypeptide; iii) an HNH polypeptide; iv) a RuvCIII polypeptide; and v) a PAM-interacting polypeptide; and b) a first fusion partner, where the first fusion partner is a CIB1 polypeptide; and B) a second fusion polypeptide comprising: a) a second polypeptide that comprises an alpha-helical recognition region; and b) a second fusion partner, where the second fusion partner is a Cry2 polypeptide.

[0279] In some cases, a Cas9 heterodimer of the present disclosure comprises: A) a first fusion polypeptide comprising: a) a first, circular permuted, polypeptide that comprises: i) a RuvCI polypeptide; ii) a RuvCII polypeptide; iii) an HNH polypeptide; iv) a RuvCIII polypeptide; and v) a PAM-interacting polypeptide; and b) a first fusion partner, where the first fusion partner is a GAI polypeptide; and B) a second fusion polypeptide comprising: a) a second polypeptide that comprises an alpha-helical recognition region; and b) a second fusion partner, where the second fusion partner is a GID1 polypeptide. In some cases, a Cas9 heterodimer of the present disclosure comprises: A) a first fusion polypeptide comprising: a) a first, circular permuted, polypeptide that comprises: i) a RuvCI polypeptide; ii) a RuvCII polypeptide; iii) an HNH polypeptide; iv) a RuvCIII polypeptide; and v) a PAM-interacting polypeptide; and b) a first fusion partner, where the first fusion partner is a GID1 polypeptide; and B) a second fusion polypeptide comprising: a) a second polypeptide that comprises an alpha-helical recognition region; and b) a second fusion partner, where the second fusion partner is a GAI polypeptide.

[0280] Cas9 Protein

[0281] The components of a Cas9 heterodimer (e.g,. the nuclease lobe, sub-regions of a nuclease lobe, the alpha-helical lobe, etc.) can be derived from any convenient Cas9 protein. Example Cas9 proteins include, but are not limited to the Streptococcus pyogenes Cas9 amino acid sequence set forth in SEQ ID NO: 1545 (depicted in FIG. 5 and used as a reference Cas9 sequence in the examples below), as well as the Cas9 amino acid sequences set forth in any of SEQ ID NOs: 1-259 and 795-1346.

[0282] A subject Cas9 guide RNA and a subject Cas9 heterodimer form a complex. The guide RNA provides target specificity to the complex by comprising a nucleotide sequence that is complementary to a sequence (the target site) of a target nucleic acid. The Cas9 heterodimer of the complex provides the site-specific activity. In other words, the Cas9 heterodimer is guided to a target site within a target nucleic acid sequence (e.g. a chromosomal sequence or an extrachromosomal sequence, e.g. an episomal sequence, a minicircle sequence, a mitochondrial sequence, a chloroplast sequence, a plasmid sequence, etc.) by virtue of its association with the protein-binding segment of the Cas9 guide RNA (described elsewhere).

[0283] A subject Cas9 heterodimer can bind and/or modify (e.g., cleave, methylate, demethylate, etc.) a target nucleic acid and/or a polypeptide associated with target nucleic acid (e.g., methylation or acetylation of a histone tail). A subject Cas9 heterodimer can exhibit site-directed enzymatic activity (e.g., nuclease activity, activity for DNA and/or RNA methylation, activity for DNA and/or RNA cleavage, activity for histone acetylation, activity for histone methylation, activity for RNA modification, activity for RNA-binding, ativity for RNA splicing etc.). In some cases the Cas9 heterodimer exhibits reduced nuclease activity relative to the corresponding portion of a wild type Cas9 polypeptide. In some cases, the Cas9 heterodimer is enzymatically inactive (sometimes referred to as a “dead Cas9 heterodimer”.

[0284] Assays to determine whether a subject Cas9 heterodimer interacts with a subject guide RNA and/or a target nucleic acid can be any convenient binding assay that tests for binding between a protein and a nucleic acid. Assays to determine whether a subject Cas9 heterodimer has an activity (e.g., to determine if the polypeptide has nuclease activity that cleave a target nucleic acid) can be any convenient assay (e.g., a nucleic acid cleavage assay) that tests for the desired acitvity (e.g., cleavage, methylation, etc.).

[0285] In some cases, a subject Cas9 heterodimer (e.g., a Cas9 heterodimer having a fusion partner that provides an activity) has enzymatic activity that modifies target nucleic acid (e.g., nuclease activity (which can be provided by the Cas9 sequences, but can alternatively be provided by exogenous amino acid sequences), methyltransferase activity, demethylase activity, DNA repair activity, DNA damage activity, deamination activity, dismutase activity, alkylation activity, depurination activity, oxidation activity, pyrimidine dimer forming activity, integrase activity, transposase activity, recombinase activity, polymerase activity, ligase activity, helicase activity, photolyase activity or glycosylase activity) and/or a polypeptide (e.g., a histone) associated with target nucleic acid (e.g., methyltransferase activity, demethylase activity, acetyltransferase activity, deacetylase activity, kinase activity, phosphatase activity, ubiquitin ligase activity, deubiquitinating activity, adenylation activity, deadenylation activity, SUMOylating activity, deSUMOylating activity, ribosylation activity, deribosylation activity, myristoylation activity or demyristoylation activity).

[0286] Many Cas9 orthologs from a wide variety of species have been identified and the protiens share only a few identical amino acids. Identified Cas9 orthologs have the same domain architecture with a central HNH endonuclease domain and a split RuvC/RNaseH domain (FIG. 20A (Table 1)). Cas9 proteins share 4 key motifs with a conserved architecture. Motifs 1, 2, and 4 are RuvC like motifs while motif 3 is an HNH-motif. In some cases, a suitable Cas9 polypeptide comprises an amino acid sequence having 4 motifs, each of motifs 1-4 having 60% or more, 70% or more, 75% or more, 80% or more, 85% or more, 90% or more, 95% or more, 99% or more or 100% amino acid sequence identity to motifs 1-4 of a Cas9 amino acid sequence (e.g., SEQ ID NO: 1545).

[0287] Variant Cas9 Polypeptides (Variant Cas9 Heterodimers)

[0288] The present disclosure provides compositions and methods that include a variant Cas9 heterodimer. A variant Cas9 heterodimer has an amino acid sequence that is different by at least one amino acid (e.g., has a deletion, insertion, substitution, fusion) when compared to the amino acid sequence of a wild type Cas9 polypeptide. In some instances, the variant Cas9 heterodimer has an amino acid change (e.g., deletion, insertion, or substitution) that reduces the nuclease activity of the Cas9 heterodimer. For example, in some instances, the variant Cas9 heterodimer has less than 50%, less than 40%, less than 30%, less than 20%, less than 10%, less than 5%, or less than 1% of the nuclease activity of the corresponding unmutated Cas9 heterodimer. In some cases, the variant Cas9 heterodimer has substantially no nuclease activity. When a subject Cas9 heterodimer is a variant Cas9 heterodimer that has no substantial nuclease activity, it can be referred to as a “dead Cas9 heterodimer” or “dCas9 heterodimer.”

[0289] Thus, a subject Cas9 heterodimer can have reduced cleavage activity (e.g., can have nickase activity). For example, a Cas9 heterodimer can have a functional HNH domain, but a defective RuvC domain. A Cas9 heterodimer can have a functional RuvC domain, but a defective HNH domain A Cas9 heterodimer can substantially lack nuclease activity (e.g., can have defective HNH and RuvC domains). Any convenient amino acid mutation can be used to elicit the desired variant Cas9. For example, many amino acid mutations are known in the art that result in a Cas9 having a defective HNH domain and/or a defective RuvC domain.

[0290] In some cases, a variant Cas9 heterodimer has reduced nuclease activity. For example, a variant Cas9 heterodimer suitable for use in a binding method of the present disclosure can exhibit less than about 20%, less than about 15%, less than about 10%, less than about 5%, less than about 1%, or less than about 0.1%, of the endonuclease activity of a corresponding unmutated Cas9 heterodimer, e.g., a Cas9 heterodimer comprising a wild type Cas9 amino acid sequence.

[0291] In some cases, a variant Cas9 heterodimer can cleave the complementary strand of a target nucleic acid but has reduced ability to cleave the non-complementary strand of a double stranded target nucleic acid. For example, the variant Cas9 polypeptide can have a mutation (amino acid substitution) that reduces the function of the RuvC domain. As a non-limiting example, in some embodiments, a variant Cas9 heterodimer has a D10A (aspartate to alanine at amino acid position 10 of SEQ ID NO:1545) mutation (or the corresponding mutation of any of the proteins presented in SEQ ID NOs:1-256 and 795-1346) and can therefore cleave the complementary strand of a double stranded target nucleic acid but has reduced ability to cleave the non-complementary strand of a double stranded target nucleic acid (thus resulting in a single strand break (SSB) instead of a double strand break (DSB) (nickase activity) when the variant Cas9 heterodimer cleaves a double stranded target nucleic acid) (see, for example, Jinek et al., Science. 2012 Aug. 17; 337(6096):816-21).

[0292] In some cases, a variant Cas9 heterodimer can cleave the non-complementary strand of a double stranded target nucleic acid but has reduced ability to cleave the complementary strand of the target nucleic acid. For example, the variant Cas9 heterodimer can have a mutation (amino acid substitution) that reduces the function of the HNH domain. As a non-limiting example, in some embodiments, a variant Cas9 heterodimer has an H839A mutation (histidine to alanine at amino acid position 839 of SEQ ID NO: 1545; or the corresponding mutation of any of the proteins set forth as SEQ ID NOs:1-256 and 795-1346) and can therefore cleave the non-complementary strand of the target nucleic acid but has reduced ability to cleave the complementary strand of the target nucleic acid (thus resulting in a SSB instead of a DSB when the variant Cas9 polypeptide cleaves a double stranded target nucleic acid)(nickase activity). Such a Cas9 heterodimer has a reduced ability to cleave a target nucleic acid (e.g., a single or double stranded target nucleic acid) and retains the ability to bind a target nucleic acid (e.g., a single or double stranded target nucleic acid).

[0293] In some cases, a variant Cas9 heterodimer has a reduced ability to cleave both the complementary and the non-complementary strands of a double stranded target nucleic acid. As a non-limiting example, in some cases, the variant Cas9 polypeptide harbors both the D10A and the H839A mutations (of SEQ ID NO: 1545, or the corresponding mutations of any of the proteins set forth as SEQ ID NOs:1-256 and 795-1346) such that the heterodimer has a reduced ability to cleave both the complementary and the non-complementary strands of a double stranded target nucleic acid. Such a Cas9 heterodimer has a reduced ability to cleave a target nucleic acid (e.g., a single stranded or double stranded target nucleic acid) but retains the ability to bind a target nucleic acid (e.g., a single or double stranded target nucleic acid).

[0294] Additional examples of Cas 9 mutations that can reduce the cleavage activity of Cas9 can be found in the art, for example, see Jinek et al., Science. 2012 Aug. 17; 337(6096):816-21; Chylinski et al., RNA Biol. 2013 May; 10(5):726-37; Ma et al., Biomed Res Int. 2013; 2013:270805; Hou et al., Proc Natl Acad Sci USA. 2013 Sep. 24; 110(39):15644-9; Jinek et al., Elife. 2013; 2:e00471; Pattanayak et al., Nat Biotechnol. 2013 September; 31(9):839-43; Qi et al, Cell. 2013 Feb. 28; 152(5):1173-83; Wang et al., Cell. 2013 May 9; 153(4):910-8; Auer et. al., Genome Res. 2013 Oct. 31; Chen et. al., Nucleic Acids Res. 2013 Nov. 1; 41(20):e19; Cheng et. al., Cell Res. 2013 October; 23(10):1163-71; Cho et. al., Genetics. 2013 November; 195(3):1177-80; DiCarlo et al., Nucleic Acids Res. 2013 April; 41(7):4336-43; Dickinson et. al., Nat Methods. 2013 October; 10(10):1028-34; Ebina et. al., Sci Rep. 2013; 3:2510; Fujii et. al, Nucleic Acids Res. 2013 Nov. 1; 41(20):e187; Hu et. al., Cell Res. 2013 November; 23(11):1322-5; Jiang et. al., Nucleic Acids Res. 2013 Nov. 1; 41(20):e188; Larson et. al., Nat Protoc. 2013 November; 8(11):2180-96; Mali et. at., Nat Methods. 2013 October; 10(10):957-63; Nakayama et. al., Genesis. 2013 December; 51(12):835-43; Ran et. al., Nat Protoc. 2013 November; 8(11):2281-308; Ran et. al., Cell. 2013 Sep. 12; 154(6):1380-9; Upadhyay et. al., G3 (Bethesda). 2013 Dec. 9; 3(12):2233-8; Walsh et. al., Proc Natl Acad Sci USA. 2013 Sep. 24; 110(39):15514-5; Xie et. al., Mol Plant. 2013 Oct. 9; Yang et. al., Cell. 2013 Sep. 12; 154(6):1370-9; and U.S. patents and patent applications: U.S. Pat. Nos. 8,906,616; 8,895,308; 8,889,418; 8,889,356; 8,871,445; 8,865,406; 8,795,965; 8,771,945; 8,697,359; 20140068797; 20140170753; 20140179006; 20140179770; 20140186843; 20140186919; 20140186958; 20140189896; 20140227787; 20140234972; 20140242664; 20140242699; 20140242700; 20140242702; 20140248702; 20140256046; 20140273037; 20140273226; 20140273230; 20140273231; 20140273232; 20140273233; 20140273234; 20140273235; 20140287938; 20140295556; 20140295557; 20140298547; 20140304853; 20140309487; 20140310828; 20140310830; 20140315985; 20140335063; 20140335620; 20140342456; 20140342457; 20140342458; 20140349400; 20140349405; 20140356867; 20140356956; 20140356958; 20140356959; 20140357523; 20140357530; 20140364333; and 20140377868; all of which are hereby incorporated by reference in their entirety.

[0295] Chimeric Polypeptides (Fusion Polypetides)

[0296] In some embodiments, a Cas9 heterodimer is a chimeric Cas9 heterodimer that is fused to a fusion partner and can bind and/or modify a target nucleic acid (e.g., cleave, methylate, demethylate, etc.) and/or modify a polypeptide associated with target nucleic acid (e.g., methylation, acetylation, etc., of, for example, a histone tail) and/or modulate transcription of a target nucleic acid. In some cases, a Cas9 heterodimer with a fusion partner has reduced nuclease activity (e.g., as described above) and is fused to a heterologous polypeptide that provides an activity that will be exhibited by the Cas9 heterodimer (e.g., target cleavage, target methylation, transcription modulation, etc.).

[0297] In some such cases, a method of binding, e.g., in some cases where the Cas9 heterodimer is a variant Cas9 heterodimer having a fusion partner (i.e., having a heterologous polypeptide) with an activity (e.g., an enzymatic activity) that modifies the target nucleic acid, the method can also be considered to be a method of modifying the target nucleic acid. In some cases, a method of binding a target nucleic acid (e.g., a single or double stranded target nucleic acid) can result in modification of the target nucleic acid. Thus, in some cases, a method of binding a target nucleic acid (e.g., a single or double stranded target nucleic acid) can be a method of modifying the target nucleic acid.

[0298] In some cases, a heterologous sequence provides for subcellular localization, i.e., the heterologous sequence is a subcellular localization sequence (e.g., a nuclear localization signal (NLS) for targeting to the nucleus, a sequence to keep the fusion protein out of the nucleus, e.g., a nuclear export sequence (NES), a sequence to keep the fusion protein retained in the cytoplasm, a mitochondrial localization signal for targeting to the mitochondria, a chloroplast localization signal for targeting to a chloroplast, an ER retention signal, and the like). In some embodiments, a variant Cas9 does not include a NLS so that the protein is not targeted to the nucleus (which can be advantageous, e.g., when the target nucleic acid is an RNA that is present in the cytosol). In some embodiments, the heterologous sequence can provide a tag (i.e., the heterologous sequence is a detectable label) for ease of tracking and/or purification (e.g., a fluorescent protein, e.g., green fluorescent protein (GFP), YFP, RFP, CFP, mCherry, tdTomato, and the like; a histidine tag, e.g., a 6× His tag; a hemagglutinin (HA) tag; a FLAG tag; a Myc tag; and the like).

[0299] In some embodiments, the heterologous sequence can provide for increased or decreased stability (i.e., the heterologous sequence is a stability control peptide, e.g., a degron, which in some cases is controllable (e.g., a temperature sensitive or drug controllable degron sequence). In some embodiments, the heterologous sequence can provide for increased or decreased transcription from the target nucleic acid (i.e., the heterologous sequence is a transcription modulation sequence, e.g., a transcription factor/activator or a fragment thereof, a protein or fragment thereof that recruits a transcription factor/activator, a transcription repressor or a fragment thereof, a protein or fragment thereof that recruits a transcription repressor, a small molecule/drug-responsive transcription regulator, etc.). In some embodiments, the heterologous sequence can provide a binding domain (i.e., the heterologous sequence is a protein binding sequence, e.g., to provide the ability of a Cas9 heterodimer to bind to another protein of interest, e.g., a DNA or histone modifying protein, a transcription factor or transcription repressor, a recruiting protein, an RNA modification enzyme, an RNA-binding protein, a translation initiation factor, an RNA splicing factor, etc.).

[0300] A subject Cas9 heterodimer can have multiple (1 or more, 2 or more, 3 or more, 4 or more, 5 or more, 6 or more, 7 or more, etc.) fusion partners in any combination. As an illustrative example, a Cas9 heterodimer can have a heterologous sequence that provides an activity (e.g., for transcription modulation, target modification, modification of a protein associated with a target nucleic acid, etc.) and can also have a subcellular localization sequence (e.g., one or more NLSs). In some cases, such a Cas9 heterodimer might also have a tag for ease of tracking and/or purification (e.g., green fluorescent protein (GFP), YFP, RFP, CFP, mCherry, tdTomato, and the like; a histidine tag, e.g., a 6× His tag; a hemagglutinin (HA) tag; a FLAG tag; a Myc tag; and the like). A Cas9 heterodimer can have one or more NLSs (e.g., two or more, three or more, four or more, five or more, 1, 2, 3, 4, or 5 NLSs). In some cases a fusion partner (or multiple fusion partners) (e.g., an NLS, a tag, a fusion partner providing an activity, etc.) is located at or near the C-terminus of the first and/or second polypeptide (nuclease lobe/alpha-helical lobe). In some cases a fusion partner (or multiple fusion partners) (e.g., an NLS, a tag, a fusion partner providing an activity, etc.) is located at the N-terminus of the first and/or second polypeptide (nuclease lobe/alpha-helical lobe). In some cases a Cas9 heterodimer (either on the nuclease lobe, the alpha-helical lobe, or both) has a fusion partner (or multiple fusion partners) (e.g., an NLS, a tag, a fusion partner providing an activity, etc.) at both the N-terminus and C-terminus.

[0301] Suitable fusion partners that provide for increased or decreased stability include, but are not limited to degron sequences. Degrons are readily understood by one of ordinary skill in the art to be amino acid sequences that control the stability of the protein of which they are part. For example, the stability of a protein comprising a degron sequence is controlled in part by the degron sequence. In some cases, a suitable degron is constitutive such that the degron exerts its influence on protein stability independent of experimental control (i.e., the degron is not drug inducible, temperature inducible, etc.) In some cases, the degron provides the Cas9 heterodimer with controllable stability such that the Cas9 heterodimer can be turned “on” (i.e., stable) or “off” (i.e., unstable, degraded) depending on the desired conditions. For example, if the degron is a temperature sensitive degron, the variant Cas9 polypeptide may be functional (i.e., “on”, stable) below a threshold temperature (e.g., 42° C., 41° C., 40° C., 39° C., 38° C., 37° C., 36° C., 35° C., 34° C., 33° C., 32° C., 31° C., 30° C., etc.) but non-functional (i.e., “off”, degraded) above the threshold temperature. As another example, if the degron is a drug inducible degron, the presence or absence of drug can switch the protein from an “off” (i.e., unstable) state to an “on” (i.e., stable) state or vice versa. An exemplary drug inducible degron is derived from the FKBP12 protein. The stability of the degron is controlled by the presence or absence of a small molecule that binds to the degron.

[0302] Examples of suitable degrons include, but are not limited to those degrons controlled by Shield-1, DHFR, auxins, and/or temperature. Non-limiting examples of suitable degrons are known in the art (e.g., Dohmen et al., Science, 1994. 263(5151): p. 1273-1276: Heat-inducible degron: a method for constructing temperature-sensitive mutants; Schoeber et al., Am J Physiol Renal Physiol. 2009 January; 296(1):F204-11: Conditional fast expression and function of multimeric TRPVS channels using Shield-1; Chu et al., Bioorg Med Chem Lett. 2008 Nov. 15; 18(22):5941-4: Recent progress with FKBP-derived destabilizing domains; Kanemaki, Pflugers Arch. 2012 Dec. 28: Frontiers of protein expression control with conditional degrons; Yang et al., Mol Cell. 2012 Nov. 30; 48(4):487-8: Titivated for destruction: the methyl degron; Barbour et al., Biosci Rep. 2013 Jan. 18; 33(1).: Characterization of the bipartite degron that regulates ubiquitin-independent degradation of thymidylate synthase; and Greussing et al., J Vis Exp. 2012 Nov. 10; (69): Monitoring of ubiquitin-proteasome activity in living cells using a Degron (dgn)-destabilized green fluorescent protein (GFP)-based reporter protein; all of which are hereby incorporated in their entirety by reference).

[0303] Suitable fusion partners (for either the nuclease lobe, the alpha-helical lobe, or both) include, but are not limited to, a polypeptide that provides for methyltransferase activity, demethylase activity, acetyltransferase activity, deacetylase activity, kinase activity, phosphatase activity, ubiquitin ligase activity, deubiquitinating activity, adenylation activity, deadenylation activity, SUMOylating activity, deSUMOylating activity, ribosylation activity, deribosylation activity, myristoylation activity, or demyristoylation activity, any of which can be directed at modifying nucleic acid directly (e.g., methylation of DNA or RNA) or at modifying a nucleic acid-associated polypeptide (e.g., a histone, a DNA binding protein, and RNA binding protein, and the like). Further suitable fusion partners include, but are not limited to boundary elements (e.g., CTCF), proteins and fragments thereof that provide periphery recruitment (e.g., Lamin A, Lamin B, etc.), and protein docking elements (e.g., FKBP/FRB, Pil1/Aby1, etc.).

[0304] Examples of various additional suitable fusion partners (or fragments thereof) for a subject Cas9 heterodimer include, but are not limited to those described in the PCT patent applications: WO2010075303, WO2012068627, and WO2013155555, and can be found, for example, in U.S. patents and patent applications: U.S. Pat. Nos. 8,906,616; 8,895,308; 8,889,418; 8,889,356; 8,871,445; 8,865,406; 8,795,965; 8,771,945; 8,697,359; 20140068797; 20140170753; 20140179006; 20140179770; 20140186843; 20140186919; 20140186958; 20140189896; 20140227787; 20140234972; 20140242664; 20140242699; 20140242700; 20140242702; 20140248702; 20140256046; 20140273037; 20140273226; 20140273230; 20140273231; 20140273232; 20140273233; 20140273234; 20140273235; 20140287938; 20140295556; 20140295557; 20140298547; 20140304853; 20140309487; 20140310828; 20140310830; 20140315985; 20140335063; 20140335620; 20140342456; 20140342457; 20140342458; 20140349400; 20140349405; 20140356867; 20140356956; 20140356958; 20140356959; 20140357523; 20140357530; 20140364333; and 20140377868; all of which are hereby incorporated by reference in their entirety.

[0305] For example, suitable fusion partners include, but are not limited to, a polypeptide that provides an activity that indirectly increases transcription by acting directly on the target nucleic acid or on a polypeptide (e.g., a histone, a DNA-binding protein, an RNA-binding protein, an RNA editing protein, etc.) associated with the target nucleic acid. Suitable fusion partners include, but are not limited to, a polypeptide that provides for methyltransferase activity, demethylase activity, acetyltransferase activity, deacetylase activity, kinase activity, phosphatase activity, ubiquitin ligase activity, deubiquitinating activity, adenylation activity, deadenylation activity, SUMOylating activity, deSUMOylating activity, ribosylation activity, deribosylation activity, myristoylation activity, or demyristoylation activity.

[0306] Additional suitable fusion partners include, but are not limited to, a polypeptide that directly provides for increased transcription and/or translation of a target nucleic acid (e.g., a transcription activator or a fragment thereof, a protein or fragment thereof that recruits a transcription activator, a small molecule/drug-responsive transcription and/or translation regulator, a translation-regulating protein, etc.).

[0307] Non-limiting examples of fusion partners to accomplish increased or decreased transcription include transcription activator and transcription repressor domains (e.g., the Krüppel associated box (KRAB or SKD); the Mad mSIN3 interaction domain (SID); the ERF repressor domain (ERD), etc). In some such cases, a Cas9 heterodimer is targeted by the guide nucleic acid (guide RNA) to a specific location (i.e., sequence) in the target nucleic acid and exerts locus-specific regulation such as blocking RNA polymerase binding to a promoter (which selectively inhibits transcription activator function), and/or modifying the local chromatin status (e.g., when a fusion sequence is used that modifies the target nucleic acid or modifies a polypeptide associated with the target nucleic acid). In some cases, the changes are transient (e.g., transcription repression or activation). In some cases, the changes are inheritable (e.g., when epigenetic modifications are made to the target nucleic acid or to proteins associated with the target nucleic acid, e.g., nucleosomal histones).

[0308] Non-limiting examples of fusion partners for use when targeting ssRNA target nucleic acids include (but are not limited to): splicing factors (e.g., RS domains); protein translation components (e.g., translation initiation, elongation, and/or release factors; e.g., eIF4G); RNA methylases; RNA editing enzymes (e.g., RNA deaminases, e.g., adenosine deaminase acting on RNA (ADAR), including A to I and/or C to U editing enzymes); helicases; RNA-binding proteins; and the like. It is understood that a fusion partner can include the entire protein or in some cases can include a fragment of the protein (e.g., a functional domain).

[0309] In some embodiments, the heterologous sequence can be fused to the C-terminus of the Cas9 heterodimer (e.g., of either lobe of the heterodimer). In some embodiments, the heterologous sequence can be fused to the N-terminus of the Cas9 heterodimer (e.g., of either lobe of the heterodimer). In some embodiments, the heterologous sequence can be fused to an internal portion (i.e., a portion other than the N- or C-terminus) of the Cas9 heterodimer (e.g., of either lobe of the heterodimer).

[0310] The fusion partner of a Cas9 heterodimer (e.g., either lobe) can be any domain capable of interacting with ssRNA (which, for the purposes of this disclosure, includes intramolecular and/or intermolecular secondary structures, e.g., double-stranded RNA duplexes such as hairpins, stem-loops, etc.), whether transiently or irreversibly, directly or indirectly, including but not limited to an effector domain selected from the group comprising; Endonucleases (for example RNase III, the CRR22 DYW domain, Dicer, and PIN (PilT N-terminus) domains from proteins such as SMG5 and SMG6); proteins and protein domains responsible for stimulating RNA cleavage (for example CPSF, CstF, CFIm and CFIIm); Exonucleases (for example XRN-1 or Exonuclease T); Deadenylases (for example HNT3); proteins and protein domains responsible for nonsense mediated RNA decay (for example UPF1, UPF2, UPF3, UPF3b, RNP S1, Y14, DEK, REF2, and SRm160); proteins and protein domains responsible for stabilizing RNA (for example PABP); proteins and protein domains responsible for repressing translation (for example Ago2 and Ago4); proteins and protein domains responsible for stimulating translation (for example Staufen); proteins and protein domains responsible for (e.g., capable of) modulating translation (e.g., translation factors such as initiation factors, elongation factors, release factors, etc., e.g., eIF4G); proteins and protein domains responsible for polyadenylation of RNA (for example PAP1, GLD-2, and Star-PAP); proteins and protein domains responsible for polyuridinylation of RNA (for example CI D1 and terminal uridylate transferase); proteins and protein domains responsible for RNA localization (for example from IMP1, ZBP1, She2p, She3p, and Bicaudal-D); proteins and protein domains responsible for nuclear retention of RNA (for example Rrp6); proteins and protein domains responsible for nuclear export of RNA (for example TAP, NXF1, THO, TREX, REF, and Aly); proteins and protein domains responsible for repression of RNA splicing (for example PTB, Sam68, and hnRNP A1); proteins and protein domains responsible for stimulation of RNA splicing (for example Serine/Arginine-rich (SR) domains); proteins and protein domains responsible for reducing the efficiency of transcription (for example FUS (TLS)); and proteins and protein domains responsible for stimulating transcription (for example CDK7 and HIV Tat). Alternatively, the effector domain may be selected from the group comprising Endonucleases; proteins and protein domains capable of stimulating RNA cleavage; Exonucleases; Deadenylases; proteins and protein domains having nonsense mediated RNA decay activity; proteins and protein domains capable of stabilizing RNA; proteins and protein domains capable of repressing translation; proteins and protein domains capable of stimulating translation; proteins and protein domains capable of modulating translation (e.g., translation factors such as initiation factors, elongation factors, release factors, etc., e.g., eIF4G); proteins and protein domains capable of polyadenylation of RNA; proteins and protein domains capable of polyuridinylation of RNA; proteins and protein domains having RNA localization activity; proteins and protein domains capable of nuclear retention of RNA; proteins and protein domains having RNA nuclear export activity; proteins and protein domains capable of repression of RNA splicing; proteins and protein domains capable of stimulation of RNA splicing; proteins and protein domains capable of reducing the efficiency of transcription; and proteins and protein domains capable of stimulating transcription. Another suitable fusion partner is a PUF RNA-binding domain, which is described in more detail in WO2012068627.

[0311] Some RNA splicing factors that can be used (in whole or as fragments thereof) as fusion partners for a Cas9 heterodimer have modular organization, with separate sequence-specific RNA binding modules and splicing effector domains. For example, members of the Serine/Arginine-rich (SR) protein family contain N-terminal RNA recognition motifs (RRMs) that bind to exonic splicing enhancers (ESEs) in pre-mRNAs and C-terminal RS domains that promote exon inclusion. As another example, the hnRNP protein hnRNP A1 binds to exonic splicing silencers (ESSs) through its RRM domains and inhibits exon inclusion through a C-terminal Glycine-rich domain. Some splicing factors can regulate alternative use of splice site (ss) by binding to regulatory sequences between the two alternative sites. For example, ASF/SF2 can recognize ESEs and promote the use of intron proximal sites, whereas hnRNP A1 can bind to ESSs and shift splicing towards the use of intron distal sites. One application for such factors is to generate ESFs that modulate alternative splicing of endogenous genes, particularly disease associated genes. For example, Bcl-x pre-mRNA produces two splicing isoforms with two alternative 5′ splice sites to encode proteins of opposite functions. The long splicing isoform Bch xL is a potent apoptosis inhibitor expressed in long-lived postmitotic cells and is up-regulated in many cancer cells, protecting cells against apoptotic signals. The short isoform Bcl-xS is a pro-apoptotic isoform and expressed at high levels in cells with a high turnover rate (e.g., developing lymphocytes). The ratio of the two Bcl-x splicing isoforms is regulated by multiple cis-elements that are located in either the core exon region or the exon extension region (i.e., between the two alternative 5′ splice sites). For more examples, see WO2010075303.

[0312] In some embodiments, a Cas9 heterodimer (e.g., having a wild type Cas9 cleavage activity, having reduced nuclease activity, etc.) can be linked to a fusion partner via a linker as described elsewhere.

[0313] A heterologous polypeptide (e.g., a fusion partner) may include a “Protein Transduction Domain” or PTD (also known as a CPP—cell penetrating peptide), which refers to a polypeptide, polynucleotide, carbohydrate, or organic or inorganic compound that facilitates traversing a lipid bilayer, micelle, cell membrane, organelle membrane, or vesicle membrane. A PTD attached to another molecule, which can range from a small polar molecule to a large macromolecule and/or a nanoparticle, facilitates the molecule traversing a membrane, for example going from extracellular space to intracellular space, or cytosol to within an organelle. In some embodiments, a PTD is covalently linked to the amino terminus a polypeptide (e.g., a Cas9 heterodimer). In some embodiments, a PTD is covalently linked to the carboxyl terminus of a polypeptide (e.g., a Cas9 heterodimer). In some embodiments, a PTD is covalently linked to the carboxyl terminus and the amino terminus of a Cas9 heterodimer. In some cases, a subject Cas9 heterodimer is includes (is conjugated to, is fused to) one or more PTDs (e.g., two or more, three or more, four or more PTDs). In some cases a PTD includes a nuclear localization signal (NLS) (e.g, in some cases 2 or more, 3 or more, 4 or more, or 5 or more NLSs). Thus, in some cases, a Cas9 heterodimer (e.g., a Cas9 heterodimer that includes a heterologous polypeptide sequence) includes one or more NLSs (e.g., 2 or more, 3 or more, 4 or more, or 5 or more NLSs). In some embodiments, a PTD is covalently linked to a nucleic acid (e.g., a Cas9 guide nucleic acid, a polynucleotide encoding a Cas9 guide nucleic acid, a polynucleotide encoding a Cas9 heterodimer, a donor polynucleotide, etc.). Examples of PTDs include but are not limited to a minimal undecapeptide protein transduction domain (corresponding to residues 47-57 of HIV-1 TAT comprising YGRKKRRQRRR; SEQ ID NO: 264); a polyarginine sequence comprising a number of arginines sufficient to direct entry into a cell (e.g., 3, 4, 5, 6, 7, 8, 9, 10, or 10-50 arginines); a VP22 domain (Zender et al. (2002) Cancer Gene Ther. 9(6):489-96); an Drosophila Antennapedia protein transduction domain (Noguchi et al. (2003) Diabetes 52(7):1732-1737); a truncated human calcitonin peptide (Trehin et al. (2004) Pharm. Research 21:1248-1256); polylysine (Wender et al. (2000) Proc. Natl. Acad. Sci. USA 97:13003-13008); RRQRRTSKLMKR (SEQ ID NO: 265); Transportan GWTLNSAGYLLGKINLKALAALAKKIL (SEQ ID NO: 266); KALAWEAKLAKALAKALAKHLAKALAKALKCEA (SEQ ID NO: 267); and RQIKIWFQNRRMKWKK (SEQ ID NO: 268). Exemplary PTDs include but are not limited to, YGRKKRRQRRR (SEQ ID NO: 264), RKKRRQRRR (SEQ ID NO: 269); an arginine homopolymer of from 3 arginine residues to 50 arginine residues; Exemplary PTD domain amino acid sequences include, but are not limited to, any of the following: YGRKKRRQRRR (SEQ ID NO: 264); RKKRRQRR (SEQ ID NO: 269); YARAAARQARA (SEQ ID NO: 271); THRLPRRRRRR (SEQ ID NO: 272); and GGRRARRRRRR (SEQ ID NO: 273). In some embodiments, the PTD is an activatable CPP (ACPP) (Aguilera et al. (2009) Integr Biol (Camb) June; 1(5-6): 371-381). ACPPs comprise a polycationic CPP (e.g., Arg9 or “R9”) connected via a cleavable linker to a matching polyanion (e.g., Glu9 or “E9”), which reduces the net charge to nearly zero and thereby inhibits adhesion and uptake into cells. Upon cleavage of the linker, the polyanion is released, locally unmasking the polyarginine and its inherent adhesiveness, thus “activating” the ACPP to traverse the membrane.

[0314] Compositions

[0315] The present invention provides a composition comprising a Cas9 heterodimer of the present disclosure. A subject composition is useful for carrying out a method of the present disclosure. The composition can comprise (e.g., in addition to a Cas9 guide RNA), one or more of: a salt, e.g., NaCl, MgCl₂, KCl, MgSO₄, etc.; a buffering agent, e.g., a Tris buffer, N-(2-Hydroxyethyl)piperazine-N′-(2-ethanesulfonic acid) (HEPES), 2-(N-Morpholino)ethanesulfonic acid (MES), MES sodium salt, 3-(N-Morpholino)propanesulfonic acid (MOPS), N-tris[Hydroxymethyl]methyl-3-aminopropanesulfonic acid (TAPS), etc.; a solubilizing agent; a detergent, e.g., a non-ionic detergent such as Tween-20, etc.; a protease inhibitor; and the like.

[0316] In some embodiments, a Cas9 heterodimer of the present disclosure present in a subject composition is pure, e.g., at least about 75%, at least about 80%, at least about 85%, at least about 90%, at least about 95%, at least about 98%, at least about 99%, or more than 99% pure, where “% purity” means that the Cas9 heterodimer is the recited percent free from other proteins, other macromolecules, or contaminants that may be present during the production of the Cas9 heterodimer.

[0317] Nucleic Acids

[0318] The present disclosure provides nucleic acids comprising nucleotide sequences encoding a Cas9 heterodimer of the present disclosure.

[0319] In some cases, a single nucleic acid comprises nucleotide sequences encoding the first fusion polypeptide and the second fusion polypeptide of a Cas9 heterodimer of the present disclosure. In some cases, the nucleotide sequence encoding first fusion polypeptide and the nucleotide sequence encoding the second fusion polypeptide are operably linked to the same transcriptional control element (e.g., a promoter). In some cases, the nucleotide sequence encoding first fusion polypeptide and the nucleotide sequence encoding the second fusion polypeptide are operably linked to two different transcriptional control elements (e.g., two different promoters). In some cases, the promoters are constitutive. In some cases, the promoters are inducible. In some cases, the promoters are functional in eukaryotic cells. In some cases, the promoters are cell type-specific promoters. In some cases, the promoters are tissue-specific promoters.

[0320] In some cases, nucleotide sequences encoding the first fusion polypeptide and the second fusion polypeptide of a Cas9 heterodimer of the present disclosure are on separate nucleic acids. Thus, in some cases, the present disclosure provides: a) a first nucleic acid comprising a nucleotide sequence encoding the first fusion polypeptide of a Cas9 heterodimer of the present disclosure; and b) a second nucleic acid comprising a nucleotide sequence encoding the second fusion polypeptide of a Cas9 heterodimer of the present disclosure. In some cases, the nucleotide sequence encoding first fusion polypeptide and the nucleotide sequence encoding the second fusion polypeptide are operably linked to the same transcriptional control element (e.g., a promoter). In some cases, the nucleotide sequence encoding first fusion polypeptide and the nucleotide sequence encoding the second fusion polypeptide are operably linked to two different transcriptional control elements (e.g., two different promoters).). In some cases, the promoters are constitutive. In some cases, the promoters are inducible. In some cases, the promoters are functional in eukaryotic cells. In some cases, the promoters are cell type-specific promoters. In some cases, the promoters are tissue-specific promoters.

[0321] In some cases, a nucleic acid(s) comprising a nucleotide sequence(s) encoding a Cas9 heterodimer of the present disclosure is a recombinant expression vector. In some embodiments, the recombinant expression vector is a viral construct, e.g., a recombinant adeno-associated virus construct (see, e.g., U.S. Pat. No. 7,078,387), a recombinant adenoviral construct, a recombinant lentiviral construct, a recombinant retroviral construct, etc.

[0322] Suitable expression vectors include, but are not limited to, viral vectors (e.g. viral vectors based on vaccinia virus; poliovirus; adenovirus (see, e.g., Li et al., Invest Opthalmol Vis Sci 35:2543 2549, 1994; Borras et al., Gene Ther 6:515 524, 1999; Li and Davidson, PNAS 92:7700 7704, 1995; Sakamoto et al., H Gene Ther 5:1088 1097, 1999; WO 94/12649, WO 93/03769; WO 93/19191; WO 94/28938; WO 95/11984 and WO 95/00655); adeno-associated virus (see, e.g., Ali et al., Hum Gene Ther 9:81 86, 1998, Flannery et al., PNAS 94:6916 6921, 1997; Bennett et al., Invest Opthalmol Vis Sci 38:2857 2863, 1997; Jomary et al., Gene Ther 4:683 690, 1997, Rolling et al., Hum Gene Ther 10:641 648, 1999; Ali et al., Hum Mol Genet 5:591 594, 1996; Srivastava in WO 93/09239, Samulski et al., J. Vir. (1989) 63:3822-3828; Mendelson et al., Virol. (1988) 166:154-165; and Flotte et al., PNAS (1993) 90:10613-10617); SV40; herpes simplex virus; human immunodeficiency virus (see, e.g., Miyoshi et al., PNAS 94:10319 23, 1997; Takahashi et al., J Virol 73:7812 7816, 1999); a retroviral vector (e.g., Murine Leukemia Virus, spleen necrosis virus, and vectors derived from retroviruses such as Rous Sarcoma Virus, Harvey Sarcoma Virus, avian leukosis virus, a lentivirus, human immunodeficiency virus, myeloproliferative sarcoma virus, and mammary tumor virus); and the like.

[0323] Numerous suitable expression vectors are known to those of skill in the art, and many are commercially available. The following vectors are provided by way of example; for eukaryotic host cells: pXT1, pSG5 (Stratagene), pSVK3, pBPV, pMSG, and pSVLSV40 (Pharmacia). However, any other vector may be used so long as it is compatible with the host cell.

[0324] Depending on the host/vector system utilized, any of a number of suitable transcription and translation control elements, including constitutive and inducible promoters, transcription enhancer elements, transcription terminators, etc. may be used in the expression vector (see e.g., Bitter et al. (1987) Methods in Enzymology, 153:516-544).

[0325] In some embodiments, a nucleotide sequence encoding a Cas9 heterodimer of the present disclosure (e.g., a nucleotide sequence encoding the first fusion polypeptide and/or the second fusion polypeptide of a Cas9 heterodimer of the present disclosure) is operably linked to a control element, e.g., a transcriptional control element, such as a promoter. The transcriptional control element may be functional in either a eukaryotic cell, e.g., a mammalian cell, a yeast cell, a plant cell, an amphibian cell, etc.; or a prokaryotic cell (e.g., bacterial or archaeal cell). In some embodiments, a nucleotide sequence encoding a Cas9 heterodimer of the present disclosure (e.g., a nucleotide sequence encoding the first fusion polypeptide and/or the second fusion polypeptide of a Cas9 heterodimer of the present disclosure) is operably linked to multiple control elements that allow expression of the Cas9 heterodimer in both prokaryotic and eukaryotic cells.

[0326] Non-limiting examples of suitable eukaryotic promoters (promoters functional in a eukaryotic cell) include those from cytomegalovirus (CMV) immediate early, herpes simplex virus (HSV) thymidine kinase, early and late SV40, long terminal repeats (LTRs) from retrovirus, and mouse metallothionein-I. Selection of the appropriate vector and promoter is well within the level of ordinary skill in the art. The expression vector may also contain a ribosome binding site for translation initiation and a transcription terminator. The expression vector may also include appropriate sequences for amplifying expression. The expression vector may also include nucleotide sequences encoding protein tags (e.g., 6× His tag, hemagglutinin tag, green fluorescent protein, yellow fluorescent protein, red fluorescent protein, etc.) that are fused to the Cas9 heterodimer.

[0327] In some embodiments, a nucleotide sequence encoding a Cas9 heterodimer of the present disclosure (e.g., a nucleotide sequence encoding the first fusion polypeptide and/or the second fusion polypeptide of a Cas9 heterodimer of the present disclosure) is operably linked to an inducible promoter. In some embodiments, a nucleotide sequence encoding a Cas9 heterodimer of the present disclosure (e.g., a nucleotide sequence encoding the first fusion polypeptide and/or the second fusion polypeptide of a Cas9 heterodimer of the present disclosure) is operably linked to a constitutive promoter.

[0328] Methods of introducing a nucleic acid into a host cell are known in the art, and any known method can be used to introduce a nucleic acid (e.g., an expression construct) into a cell. Suitable methods include e.g., viral or bacteriophage infection, transfection, conjugation, protoplast fusion, lipofection, electroporation, calcium phosphate precipitation, polyethyleneimine (PEI)-mediated transfection, DEAE-dextran mediated transfection, liposome-mediated transfection, particle gun technology, calcium phosphate precipitation, direct micro injection, nanoparticle-mediated nucleic acid delivery (see, e.g., Panyam et., al Adv Drug Deliv Rev. 2012 Sep. 13. pii: S0169-409X(12)00283-9. doi: 10.1016/j.addr.2012.09.023), and the like.

[0329] As used herein, a “promoter sequence” is a DNA regulatory region capable of binding RNA polymerase and initiating transcription of a downstream (3′ direction) coding or non-coding sequence. For purposes of the present disclosure, a promoter sequence is bounded at its 3′ terminus by the transcription initiation site and extends upstream (5′ direction) to include the minimum number of bases or elements necessary to initiate transcription at levels detectable above background. Within the promoter sequence will be found a transcription initiation site, as well as protein binding domains responsible for the binding of RNA polymerase. Eukaryotic promoters will often, but not always, contain “TATA” boxes and “CAT” boxes. Various promoters, including inducible promoters, may be used to drive the various vectors of the present invention.

[0330] A promoter can be a constitutively active promoter (i.e., a promoter that is constitutively in an active/“ON” state), it may be an inducible promoter (i.e., a promoter whose state, active/“ON” or inactive/“OFF”, is controlled by an external stimulus, e.g., the presence of a particular temperature, compound, or protein.), it may be a spatially restricted promoter (i.e., transcriptional control element, enhancer, etc.)(e.g., tissue specific promoter, cell type specific promoter, etc.), and it may be a temporally restricted promoter (i.e., the promoter is in the “ON” state or “OFF” state during specific stages of embryonic development or during specific stages of a biological process, e.g., hair follicle cycle in mice).

[0331] Suitable promoters can be derived from viruses and can therefore be referred to as viral promoters, or they can be derived from any organism, including prokaryotic or eukaryotic organisms. Suitable promoters can be used to drive expression by any RNA polymerase (e.g., pol I, pol II, pol III). Exemplary promoters include, but are not limited to the SV40 early promoter, mouse mammary tumor virus long terminal repeat (LTR) promoter; adenovirus major late promoter (Ad MLP); a herpes simplex virus (HSV) promoter, a cytomegalovirus (CMV) promoter such as the CMV immediate early promoter region (CMVIE), a rous sarcoma virus (RSV) promoter, a human U6 small nuclear promoter (U6) (Miyagishi et al. , Nature Biotechnology 20, 497-500 (2002)), an enhanced U6 promoter (e.g., Xia et al., Nucleic Acids Res. 2003 Sep. 1; 31(17)), a human H1 promoter (H1), and the like.

[0332] Examples of inducible promoters include, but are not limited to T7 RNA polymerase promoter, T3 RNA polymerase promoter, isopropyl-beta-D-thiogalactopyranoside (IPTG)-regulated promoter, lactose induced promoter, heat shock promoter, Tetracycline-regulated promoter, Steroid-regulated promoter, Metal-regulated promoter, estrogen receptor-regulated promoter, etc. Inducible promoters can therefore be regulated by molecules including, but not limited to, doxycycline; RNA polymerase, e.g., T7 RNA polymerase; an estrogen receptor; an estrogen receptor fusion; etc.

[0333] In some embodiments, the promoter is a spatially restricted promoter (i.e., cell type specific promoter, tissue specific promoter, etc.) such that in a multi-cellular organism, the promoter is active (i.e., “ON”) in a subset of specific cells. Spatially restricted promoters may also be referred to as enhancers, transcriptional control elements, control sequences, etc. Any convenient spatially restricted promoter may be used and the choice of suitable promoter (e.g., a brain specific promoter, a promoter that drives expression in a subset of neurons, a promoter that drives expression in the germline, a promoter that drives expression in the lungs, a promoter that drives expression in muscles, a promoter that drives expression in islet cells of the pancreas, etc.) will depend on the organism. For example, various spatially restricted promoters are known for plants, flies, worms, mammals, mice, etc. Thus, a spatially restricted promoter can be used to regulate the expression of a nucleic acid encoding a subject site-directed modifying polypeptide in a wide variety of different tissues and cell types, depending on the organism. Some spatially restricted promoters are also temporally restricted such that the promoter is in the “ON” state or “OFF” state during specific stages of embryonic development or during specific stages of a biological process (e.g., hair follicle cycle in mice).

[0334] For illustration purposes, examples of spatially restricted promoters include, but are not limited to, neuron-specific promoters, adipocyte-specific promoters, cardiomyocyte-specific promoters, smooth muscle-specific promoters, photoreceptor-specific promoters, etc. Neuron-specific spatially restricted promoters include, but are not limited to, a neuron-specific enolase (NSE) promoter (see, e.g., EMBL HSENO2, X51956); an aromatic amino acid decarboxylase (AADC) promoter; a neurofilament promoter (see, e.g., GenBank HUMNFL, L04147); a synapsin promoter (see, e.g., GenBank HUMSYNIB, M55301); a thy-1 promoter (see, e.g., Chen et al. (1987) Cell 51:7-19; and Llewellyn, et al. (2010) Nat. Med. 16(10):1161-1166); a serotonin receptor promoter (see, e.g., GenBank S62283); a tyrosine hydroxylase promoter (TH) (see, e.g., Oh et al. (2009) Gene Ther 16:437; Sasaoka et al. (1992) Mol. Brain Res. 16:274; Boundy et al. (1998) J. Neurosci. 18:9989; and Kaneda et al. (1991) Neuron 6:583-594); a GnRH promoter (see, e.g., Radovick et al. (1991) Proc. Natl. Acad. Sci. USA 88:3402-3406); an L7 promoter (see, e.g., Oberdick et al. (1990) Science 248:223-226); a DNMT promoter (see, e.g., Bartge et al. (1988) Proc. Natl. Acad. Sci. USA 85:3648-3652); an enkephalin promoter (see, e.g., Comb et al. (1988) EMBO J. 17:3793-3805); a myelin basic protein (MBP) promoter; a Ca2+-calmodulin-dependent protein kinase II-alpha (CamKIIα) promoter (see, e.g., Mayford et al. (1996) Proc. Natl. Acad. Sci. USA 93:13250; and Casanova et al. (2001) Genesis 31:37); a CMV enhancer/platelet-derived growth factor-β promoter (see, e.g., Liu et al. (2004) Gene Therapy 11:52-60); and the like.

[0335] Adipocyte-specific spatially restricted promoters include, but are not limited to aP2 gene promoter/enhancer, e.g., a region from −5.4 kb to +21 bp of a human aP2 gene (see, e.g., Tozzo et al. (1997) Endocrinol. 138:1604; Ross et al. (1990) Proc. Natl. Acad. Sci. USA 87:9590; and Pavjani et al. (2005) Nat. Med. 11:797); a glucose transporter-4 (GLUT4) promoter (see, e.g., Knight et al. (2003) Proc. Natl. Acad. Sci. USA 100:14725); a fatty acid translocase (FAT/CD36) promoter (see, e.g., Kuriki et al. (2002) Biol. Pharm. Bull. 25:1476; and Sato et al. (2002) J. Biol. Chem. 277:15703); a stearoyl-CoA desaturase-1 (SCD1) promoter (Tabor et al. (1999) J. Biol. Chem. 274:20603); a leptin promoter (see, e.g., Mason et al. (1998) Endocrinol. 139:1013; and Chen et al. (1999) Biochem. Biophys. Res. Comm 262:187); an adiponectin promoter (see, e.g., Kita et al. (2005) Biochem. Biophys. Res. Comm 331:484; and Chakrabarti (2010) Endocrinol. 151:2408); an adipsin promoter (see, e.g., Platt et al. (1989) Proc. Natl. Acad. Sci. USA 86:7490); a resistin promoter (see, e.g., Seo et al. (2003) Molec. Endocrinol. 17:1522); and the like.

[0336] Cardiomyocyte-specific spatially restricted promoters include, but are not limited to control sequences derived from the following genes: myosin light chain-2, α-myosin heavy chain, AE3, cardiac troponin C, cardiac actin, and the like. Franz et al. (1997) Cardiovasc. Res. 35:560-566; Robbins et al. (1995) Ann. N.Y. Acad. Sci. 752:492-505; Linn et al. (1995) Circ. Res. 76:584-591; Parmacek et al. (1994) Mol. Cell. Biol. 14:1870-1885; Hunter et al. (1993) Hypertension 22:608-617; and Sartorelli et al. (1992) Proc. Natl. Acad. Sci. USA 89:4047-4051.

[0337] Smooth muscle-specific spatially restricted promoters include, but are not limited to an SM22α promoter (see, e.g., Akyürek et al. (2000) Mol. Med. 6:983; and U.S. Pat. No. 7,169,874); a smoothelin promoter (see, e.g., WO 2001/018048); an α-smooth muscle actin promoter; and the like. For example, a 0.4 kb region of the SM22α promoter, within which lie two CArG elements, has been shown to mediate vascular smooth muscle cell-specific expression (see, e.g., Kim, et al. (1997) Mol. Cell. Biol. 17, 2266-2278; Li, et al., (1996) J. Cell Biol. 132, 849-859; and Moessler, et al. (1996) Development 122, 2415-2425).

[0338] Photoreceptor-specific spatially restricted promoters include, but are not limited to, a rhodopsin promoter; a rhodopsin kinase promoter (Young et al. (2003) Ophthalmol. Vis. Sci. 44:4076); a beta phosphodiesterase gene promoter (Nicoud et al. (2007) J. Gene Med. 9:1015); a retinitis pigmentosa gene promoter (Nicoud et al. (2007) supra); an interphotoreceptor retinoid-binding protein (IRBP) gene enhancer (Nicoud et al. (2007) supra); an IRBP gene promoter (Yokoyama et al. (1992) Exp Eye Res. 55:225); and the like.

[0339] Host Cells

[0340] The present disclosure provides host cells comprising (e.g., genetically modified to comprise) a nucleic acid of the present disclosure. The present disclosure provides host cells comprising (e.g., genetically modified to comprise) a recombinant vector of the present disclosure.

[0341] Suitable host cells include, e.g. a bacterial cell; an archaeal cell; a cell of a single-cell eukaryotic organism; a plant cell; an algal cell, e.g., Botryococcus braunii, Chlamydomonas reinhardtii, Nannochloropsis gaditana, Chlorella pyrenoidosa, Sargassum patens C. Agardh, and the like; a fungal cell (e.g., a yeast cell); an animal cell; a cell from an invertebrate animal (e.g. fruit fly, cnidarian, echinoderm, nematode, etc.); a cell from a vertebrate animal (e.g., fish, amphibian, reptile, bird, mammal); a cell from a mammal (e.g., a cell from a rodent, a cell from a human, etc.); and the like.

[0342] A suitable host cell can be a stem cell (e.g. an embryonic stem (ES) cell, an induced pluripotent stem (iPS) cell); a germ cell; a somatic cell, e.g. a fibroblast, a hematopoietic cell, a neuron, a muscle cell, a bone cell, a hepatocyte, a pancreatic cell; an in vitro or in vivo embryonic cell of an embryo at any stage, e.g., a 1-cell, 2-cell, 4-cell, 8-cell, etc. stage zebrafish embryo; etc.). Cells may be from established cell lines or they may be primary cells, where “primary cells”, “primary cell lines”, and “primary cultures” are used interchangeably herein to refer to cells and cells cultures that have been derived from a subject and allowed to grow in vitro for a limited number of passages, i.e. splittings, of the culture. For example, primary cultures include cultures that may have been passaged 0 times, 1 time, 2 times, 4 times, 5 times, 10 times, or 15 times, but not enough times go through the crisis stage. Primary cell lines can be maintained for fewer than 10 passages in vitro. Host cells are in many embodiments unicellular organisms, or are grown in culture.

[0343] If the cells are primary cells, they may be harvest from an organism (e.g., an individual) by any convenient method. For example, leukocytes may be conveniently harvested by apheresis, leukocytapheresis, density gradient separation, etc., while cells from tissues such as skin, muscle, bone marrow, spleen, liver, pancreas, lung, intestine, stomach, etc. are most conveniently harvested by biopsy. An appropriate solution may be used for dispersion or suspension of the harvested cells. Such solution will generally be a balanced salt solution, e.g. normal saline, phosphate-buffered saline (PBS), Hank's balanced salt solution, etc., conveniently supplemented with fetal calf serum or other naturally occurring factors, in conjunction with an acceptable buffer at low concentration, e.g., from 5-25 mM. Convenient buffers include HEPES, phosphate buffers, lactate buffers, etc. The cells may be used immediately, or they may be stored, frozen, for long periods of time, being thawed and capable of being reused. In such cases, the cells can be frozen in 10% dimethyl sulfoxide (DMSO), 50% serum, 40% buffered medium, or some other such solution as is commonly used in the art to preserve cells at such freezing temperatures, and thawed in a manner as commonly known in the art for thawing frozen cultured cells.

[0344] In some embodiments, a subject genetically modified host cell is in vitro. In some embodiments, a subject genetically modified host cell is in vivo. In some embodiments, a subject genetically modified host cell is a prokaryotic cell or is derived from a prokaryotic cell. In some embodiments, a subject genetically modified host cell is a bacterial cell or is derived from a bacterial cell. In some embodiments, a subject genetically modified host cell is an archaeal cell or is derived from an archaeal cell. In some embodiments, a subject genetically modified host cell is a eukaryotic cell or is derived from a eukaryotic cell. In some embodiments, a subject genetically modified host cell is a plant cell or is derived from a plant cell. In some embodiments, a subject genetically modified host cell is an animal cell or is derived from an animal cell. In some embodiments, a subject genetically modified host cell is an invertebrate cell or is derived from an invertebrate cell. In some embodiments, a subject genetically modified host cell is a vertebrate cell or is derived from a vertebrate cell. In some embodiments, a subject genetically modified host cell is a mammalian cell or is derived from a mammalian cell. In some embodiments, a subject genetically modified host cell is a rodent cell or is derived from a rodent cell. In some embodiments, a subject genetically modified host cell is a human cell or is derived from a human cell.

[0345] The present disclosure further provides progeny of a subject genetically modified cell, where the progeny can comprise the same exogenous nucleic acid or polypeptide as the subject genetically modified cell from which it was derived. The present disclosure further provides a composition comprising a subject genetically modified host cell.

[0346] Non-Human Genetically Modified Organisms

[0347] In some embodiments, a genetically modified host cell has been genetically modified with an exogenous nucleic acid comprising a nucleotide sequence encoding a subject Cas9 heterodimer (e.g., a circular permuted Cas9 heterodimer; a Cas9 heterodimer having a dimer pair; comprising WT Cas9 sequences; a variant Cas9, having mutations relative to a WT Cas9, such as a Cas9 with reduced nuclease activity and/or a heterologous sequence that provides an activity such as transcription modulation, methylation, etc. ; and the like). If such a cell is a eukaryotic single-cell organism, then the modified cell can be considered a genetically modified organism. In some embodiments, subject non-human genetically modified organism is a Cas9 transgenic multicellular organism.

[0348] In some embodiments, a subject genetically modified non-human host cell (e.g., a cell that has been genetically modified with an exogenous nucleic acid comprising a nucleotide sequence encoding a subject Cas9 heterodimer e (e.g., a circular permuted Cas9 heterodimer, a Cas9 heterodimer having a dimer pair; etc.) can generate a subject genetically modified non-human organism (e.g., a mouse, a fish, a frog, a fly, a worm, etc.). For example, if the genetically modified host cell is a pluripotent stem cell (i.e., PSC) or a germ cell (e.g., sperm, oocyte, etc.), an entire genetically modified organism can be derived from the genetically modified host cell. In some embodiments, the genetically modified host cell is a pluripotent stem cell (e.g., ESC, iPSC, pluripotent plant stem cell, etc.) or a germ cell (e.g., sperm cell, oocyte, etc.), either in vivo or in vitro, that can give rise to a genetically modified organism. In some embodiments the genetically modified host cell is a vertebrate PSC (e.g., ESC, iPSC, etc.) and is used to generate a genetically modified organism (e.g. by injecting a PSC into a blastocyst to produce a chimeric/mosaic animal, which could then be mated to generate non-chimeric/non-mosaic genetically modified organisms; grafting in the case of plants; etc.). Any convenient method/protocol for producing a genetically modified organism is suitable for producing a genetically modified host cell comprising an exogenous nucleic acid comprising a nucleotide sequence encoding a subject Cas9 heterodimer e (e.g., a circular permuted Cas9 heterodimer, a Cas9 heterodimer having a dimer pair; etc.). Methods of producing genetically modified organisms are known in the art. For example, see Cho et al., Curr Protoc Cell Biol. 2009 March; Chapter 19:Unit 19.11: Generation of transgenic mice; Gama et al., Brain Struct Funct. 2010 March; 214(2-3):91-109. Epub 2009 Nov. 25: Animal transgenesis: an overview; Husaini et al., G M Crops. 2011 June-December; 2(3):150-62. Epub 2011 Jun. 1: Approaches for gene targeting and targeted gene expression in plants.

[0349] In some embodiments, a genetically modified organism comprises a target cell for methods of the invention, and thus can be considered a source for target cells. For example, if a genetically modified cell comprising one or more exogenous nucleic acids comprising nucleotide sequences encoding the two polypeptides of a subject Cas9 heterodimer is used to generate a genetically modified organism, then the cells of the genetically modified organism comprise the one or more exogenous nucleic acids comprising nucleotide sequences encoding the two polypeptides of a subject Cas9 heterodimer. In some such embodiments, the DNA of a cell or cells of the genetically modified organism can be targeted for modification by introducing into the cell or cells a Cas9 guide RNA (e.g., a truncated Cas9 guide RNA) (or a nucleic acid encoding the Cas9 guide RNA) and in some cases a dimerizer (e.g., and/or in some cases a donor polynucleotide). For example, the introduction of a Cas9 guide RNA (or a DNA encoding the same) into a subset of cells (e.g., brain cells, intestinal cells, kidney cells, lung cells, blood cells, etc.) of the genetically modified organism can target the DNA of such cells for modification, the genomic location of which will depend on the targeting sequence of the introduced Cas9 guide RNA.

[0350] In some embodiments, a genetically modified organism is a source of target cells for methods of the invention. For example, a genetically modified organism comprising cells that are genetically modified with an exogenous nucleic acid comprising a nucleotide sequence encoding a subject Cas9 heterodimer can provide a source of genetically modified cells, for example PSCs (e.g., ESCs, iPSCs, sperm, oocytes, etc.), neurons, progenitor cells, cardiomyocytes, etc.

[0351] In some embodiments, a genetically modified cell is a PSC comprising an exogenous nucleic acid comprising a nucleotide sequence encoding a subject Cas9 heterodimer. As such, the PSC can be a target cell such that the DNA of the PSC can be targeted for modification by introducing into the PSC a Cas9 guide RNA (e.g., a truncated Cas9 guide RNA) (or a nucleic acid encoding the Cas9 guide RNA) and in some cases a dimerizer (e.g., light, a dimerizing agent, etc.), and optionally a donor nucleic acid (donor polynucleotide), and the genomic location of the modification will depend on the targeting sequence of the introduced Cas9 guide RNA. Thus, in some embodiments, the methods described herein can be used to modify the DNA (e.g., delete and/or replace any desired genomic location) of PSCs derived from a subject genetically modified organism. Such modified PSCs can then be used to generate organisms having both (i) an exogenous nucleic acid comprising a nucleotide sequence encoding a subject Cas9 heterodimer and (ii) a DNA modification that was introduced into the PSC.

[0352] An exogenous nucleic acid comprising a nucleotide sequence encoding a subject Cas9 heterodimer (e.g., comprising WT Cas9 sequences; a variant Cas9, having mutations relative to a WT Cas9, such as a Cas9 with reduced nuclease activity and/or a heterologous sequence that provides an activity such as transcription modulation, methylation, etc.) can be under the control of (i.e., operably linked to) an unknown promoter (e.g., when the nucleic acid randomly integrates into a host cell genome) or can be under the control of (i.e., operably linked to) a known promoter. Suitable known promoters can be any known promoter and include constitutively active promoters (e.g., CMV promoter), inducible promoters (e.g., heat shock promoter, Tetracycline-regulated promoter, Steroid-regulated promoter, Metal-regulated promoter, estrogen receptor-regulated promoter, etc.), spatially restricted and/or temporally restricted promoters (e.g., a tissue specific promoter, a cell type specific promoter, etc.), etc.

[0353] A subject genetically modified non-human organism can be any organism other than a human, including for example, a plant; algae; an invertebrate (e.g., a cnidarian, an echinoderm, a worm, a fly, etc.); a vertebrate (e.g., a fish (e.g., zebrafish, puffer fish, gold fish, etc.), an amphibian (e.g., salamander, frog, etc.), a reptile, a bird, a mammal, etc.); an ungulate (e.g., a goat, a pig, a sheep, a cow, etc.); a rodent (e.g., a mouse, a rat, a hamster, a guinea pig); a lagomorpha (e.g., a rabbit); etc.

[0354] Transgenic Non-Human Animals

[0355] As described above, in some embodiments, a subject nucleic acid (e.g., one or more nucleic acids comprising nucleotide sequences encoding a subject Cas9 heterodimer, e.g., a circular permuted Cas9 heterodimer; a Cas9 heterodimer having a dimer pair; comprising WT Cas9 sequences; a variant Cas9, having mutations relative to a WT Cas9, such as a Cas9 with reduced nuclease activity and/or a heterologous sequence that provides an activity such as transcription modulation, methylation, etc. ; and the like), e.g., a recombinant expression vector, is used as a transgene to generate a transgenic animal that produces a Cas9 heterodimer. Thus, the present disclosure further provides a transgenic non-human animal, which animal comprises a transgene comprising a subject nucleic acid comprising a nucleotide sequence encoding a Cas9 heterodimer (e.g., one ore more nucleic acids comprising nucleotide sequences encoding a Cas9 heterodimer). In some embodiments, the genome of the transgenic non-human animal comprises a subject nucleotide sequence encoding a Cas9 heterodimer. In some embodiments, the transgenic non-human animal is homozygous for the genetic modification. In some embodiments, the transgenic non-human animal is heterozygous for the genetic modification. In some embodiments, the transgenic non-human animal is a vertebrate, for example, a fish (e.g., zebra fish, gold fish, puffer fish, cave fish, etc.), an amphibian (frog, salamander, etc.), a bird (e.g., chicken, turkey, etc.), a reptile (e.g., snake, lizard, etc.), a mammal (e.g., an ungulate, e.g., a pig, a cow, a goat, a sheep, etc.; a lagomorph (e.g., a rabbit); a rodent (e.g., a rat, a mouse); a non-human primate; etc.), etc.

[0356] Nucleotide sequences encoding a Cas9 heterodimer (e.g., one or more nucleic acids comprising nucleotide sequences encoding a Cas9 heterodimer) can be under the control of (i.e., operably linked to) an unknown promoter (e.g., when the nucleic acid randomly integrates into a host cell genome) or can be under the control of (i.e., operably linked to) a known promoter. Suitable known promoters can be any known promoter and include constitutively active promoters (e.g., CMV promoter), inducible promoters (e.g., heat shock promoter, Tetracycline-regulated promoter, Steroid-regulated promoter, Metal-regulated promoter, estrogen receptor-regulated promoter, etc.), spatially restricted and/or temporally restricted promoters (e.g., a tissue specific promoter, a cell type specific promoter, etc.), etc.

[0357] Transgenic Plants

[0358] As described above, in some embodiments, a subject nucleic acid (e.g., one or more nucleic acids comprising nucleotide sequences encoding a subject Cas9 heterodimer, e.g., a circular permuted Cas9 heterodimer; a Cas9 heterodimer having a dimer pair; comprising WT Cas9 sequences; a variant Cas9, having mutations relative to a WT Cas9, such as a Cas9 with reduced nuclease activity and/or a heterologous sequence that provides an activity such as transcription modulation, methylation, etc. ; and the like), e.g., a recombinant expression vector, is used as a transgene to generate a transgenic plant that produces a Cas9 heterodimer. Thus, the present disclosure further provides a transgenic plant, which plant comprises a transgene comprising a subject nucleic acid comprising a nucleotide sequence encoding a Cas9 heterodimer (e.g., one or more nucleic acids comprising nucleotide sequences encoding a Cas9 heterodimer). In some embodiments, the genome of the transgenic plant comprises a subject nucleic acid. In some embodiments, the transgenic plant is homozygous for the genetic modification. In some embodiments, the transgenic plant is heterozygous for the genetic modification.

[0359] Methods of introducing exogenous nucleic acids into plant cells are well known in the art. Such plant cells are considered “transformed,” as defined above. Suitable methods include viral infection (such as double stranded DNA viruses), transfection, conjugation, protoplast fusion, electroporation, particle gun technology, calcium phosphate precipitation, direct microinjection, silicon carbide whiskers technology, Agrobacterium-mediated transformation and the like. The choice of method is generally dependent on the type of cell being transformed and the circumstances under which the transformation is taking place (i.e. in vitro, ex vivo, or in vivo).

[0360] Transformation methods based upon the soil bacterium Agrobacterium tumefaciens are particularly useful for introducing an exogenous nucleic acid molecule into a vascular plant. The wild type form of Agrobacterium contains a Ti (tumor-inducing) plasmid that directs production of tumorigenic crown gall growth on host plants. Transfer of the tumor-inducing T-DNA region of the Ti plasmid to a plant genome requires the Ti plasmid-encoded virulence genes as well as T-DNA borders, which are a set of direct DNA repeats that delineate the region to be transferred. An Agrobacterium-based vector is a modified form of a Ti plasmid, in which the tumor inducing functions are replaced by the nucleic acid sequence of interest to be introduced into the plant host.

[0361] Agrobacterium-mediated transformation generally employs cointegrate vectors or binary vector systems, in which the components of the Ti plasmid are divided between a helper vector, which resides permanently in the Agrobacterium host and carries the virulence genes, and a shuttle vector, which contains the gene of interest bounded by T-DNA sequences. A variety of binary vectors are well known in the art and are commercially available, for example, from Clontech (Palo Alto, Calif.). Methods of coculturing Agrobacterium with cultured plant cells or wounded tissue such as leaf tissue, root explants, hypocotyledons, stem pieces or tubers, for example, also are well known in the art. See., e.g., Glick and Thompson, (eds.), Methods in Plant Molecular Biology and Biotechnology, Boca Raton, Fla.: CRC Press (1993).

[0362] Microprojectile-mediated transformation also can be used to produce a subject transgenic plant. This method, first described by Klein et al. (Nature 327:70-73 (1987)), relies on microprojectiles such as gold or tungsten that are coated with the desired nucleic acid molecule by precipitation with calcium chloride, spermidine or polyethylene glycol. The microprojectile particles are accelerated at high speed into an angiosperm tissue using a device such as the BIOLISTIC PD-1000 (Biorad; Hercules Calif.).

[0363] A subject nucleic acid may be introduced into a plant in a manner such that the nucleic acid is able to enter a plant cell(s), e.g., via an in vivo or ex vivo protocol. By “in vivo,” it is meant in the nucleic acid is administered to a living body of a plant e.g. infiltration. By “ex vivo” it is meant that cells or explants are modified outside of the plant, and then such cells or organs are regenerated to a plant. A number of vectors suitable for stable transformation of plant cells or for the establishment of transgenic plants have been described, including those described in Weissbach and Weissbach, (1989) Methods for Plant Molecular Biology Academic Press, and Gelvin et al., (1990) Plant Molecular Biology Manual, Kluwer Academic Publishers. Specific examples include those derived from a Ti plasmid of Agrobacterium tumefaciens, as well as those disclosed by Herrera-Estrella et al. (1983) Nature 303: 209, Bevan (1984) Nucl Acid Res. 12: 8711-8721, Klee (1985) Bio/Technolo 3: 637-642. Alternatively, non-Ti vectors can be used to transfer the DNA into plants and cells by using free DNA delivery techniques. By using these methods transgenic plants such as wheat, rice (Christou (1991) Bio/Technology 9:957-9 and 4462) and corn (Gordon-Kamm (1990) Plant Cell 2: 603-618) can be produced. An immature embryo can also be a good target tissue for monocots for direct DNA delivery techniques by using the particle gun (Weeks et al. (1993) Plant Physiol 102: 1077-1084; Vasil (1993) Bio/Technolo 10: 667-674; Wan and Lemeaux (1994) Plant Physiol 104: 37-48 and for Agrobacterium-mediated DNA transfer (Ishida et al. (1996) Nature Biotech 14: 745-750). Exemplary methods for introduction of DNA into chloroplasts are biolistic bombardment, polyethylene glycol transformation of protoplasts, and microinjection (Danieli et al Nat. Biotechnol 16:345-348, 1998; Staub et al Nat. Biotechnol 18: 333-338, 2000; O'Neill et al Plant J. 3:729-738, 1993; Knoblauch et al Nat. Biotechnol 17: 906-909; U.S. Pat. Nos. 5,451,513, 5,545,817, 5,545,818, and 5,576,198; in Intl. Application No. WO 95/16783; and in Boynton et al., Methods in Enzymology 217: 510-536 (1993), Svab et al., Proc. Natl. Acad. Sci. USA 90: 913-917 (1993), and McBride et al., Proc. Nati. Acad. Sci. USA 91: 7301-7305 (1994)). Any vector suitable for the methods of biolistic bombardment, polyethylene glycol transformation of protoplasts and microinjection will be suitable as a targeting vector for chloroplast transformation. Any double stranded DNA vector may be used as a transformation vector, especially when the method of introduction does not utilize Agrobacterium.

[0364] Plants which can be genetically modified include grains, forage crops, fruits, vegetables, oil seed crops, palms, forestry, and vines. Specific examples of plants which can be modified follow: maize, banana, peanut, field peas, sunflower, tomato, canola, tobacco, wheat, barley, oats, potato, soybeans, cotton, carnations, sorghum, lupin and rice.

[0365] Also provided by the subject disclosure are transformed plant cells, tissues, plants and products that contain the transformed plant cells. A feature of the subject transformed cells, and tissues and products that include the same is the presence of a subject nucleic acid integrated into the genome, and production by plant cells of a heterodimeric Cas9. Recombinant plant cells of the present invention are useful as populations of recombinant cells, or as a tissue, seed, whole plant, stem, fruit, leaf, root, flower, stem, tuber, grain, animal feed, a field of plants, and the like.

[0366] Nucleotide sequences encoding a heterodimeric Cas9 can be under the control of (i.e., operably linked to) an unknown promoter (e.g., when the nucleic acid randomly integrates into a host cell genome) or can be under the control of (i.e., operably linked to) a known promoter. Suitable known promoters can be any known promoter and include constitutively active promoters, inducible promoters, spatially restricted and/or temporally restricted promoters, etc.

[0367] Systems and Kits

[0368] The present disclosure provides a system and/or kit comprising: a) a Cas9 heterodimer of the present disclosure; and b) a Cas9 guide RNA (e.g., a Cas9 guide RNA that comprises stem loop 1 but does not comprise at least one of: a stem loop 2 and a stem loop 3). The Cas9 guide RNA does not by itself induce heterodimerization of the Cas9 heterodimer; instead, dimerization of the first fusion polypeptide and the second fusion polypeptide of the Cas9 heterodimer is induced when the first fusion partner and the second fusion partner dimerize with one another. In some cases, the first fusion partner and the second fusion partner dimerize in the presence of a small molecule. In some cases, the first fusion partner and the second fusion partner dimerize in the presence of light of a particular wavelength range.

[0369] A system and/or kit of the present disclosure comprises a Cas9 guide RNA that comprises stem loop 1 but does not comprise at least one of: a stem loop 2 and a stem loop 3. In some cases, the Cas9 guide RNA does not comprise a stem loop 2 and a does not comprise stem loop 3. In some cases, a system and/or kit of the present disclosure comprises a small molecule dimerizer that induces dimerization of the first fusion polypeptide and the second fusion polypeptide Small molecule dimerizers (also referred to herein as “small molecule dimerizing agents”) are described elsewhere herein. In some cases, a system and/or kit of the present disclosure comprises a PAMmer (described in more detail below). In some cases, a system and/or kit of the present disclosure comprises a Donor polynucleotide (described in more detail below).

[0370] Components of a subject kit can be in separate containers; or can be combined in a single container. Any of the kits described herein can further include one or more additional reagents, where such additional reagents can be selected from: a dilution buffer; a reconstitution solution; a wash buffer; a control reagent; a control expression vector or RNA polynucleotide; a reagent for in vitro production of a Cas9 heterodimer from DNA, and the like.

[0371] In addition to above-mentioned components, a subject kit can further include instructions for using the components of the kit to practice the subject methods. The instructions for practicing the subject methods are generally recorded on a suitable recording medium. For example, the instructions may be printed on a substrate, such as paper or plastic, etc. As such, the instructions may be present in the kits as a package insert, in the labeling of the container of the kit or components thereof (i.e., associated with the packaging or subpackaging) etc. In other embodiments, the instructions are present as an electronic storage data file present on a suitable computer readable storage medium, e.g. CD-ROM, diskette, flash drive, etc. In yet other embodiments, the actual instructions are not present in the kit, but means for obtaining the instructions from a remote source, e.g. via the internet, are provided. An example of this embodiment is a kit that includes a web address where the instructions can be viewed and/or from which the instructions can be downloaded. As with the instructions, this means for obtaining the instructions is recorded on a suitable substrate.

[0372] Cas9 Guide RNA

[0373] A nucleic acid molecule that binds to a Cas9 protein (and therefore also binds to a subject Cas9 heterodimer) and targets the Cas9 protein to a specific location within the target nucleic acid is referred to herein as a “guide nucleic acid” or “Cas9 guide RNA.” In some cases, a guide nucleic acid is RNA, and in some cases, can be a hybrid nucleic acid that includes both deoxyribonucleotides and ribonucleotides. For the sake of simplicity, as used herein, the terms that include the phrase “guide RNA” (e.g., the terms “Cas9 guide RNA”, “truncated guide RNA”, “guide RNA”, and such) are meant to encompass guide RNAs and guide nucleic acids that include components/regions/sections other than RNA (e.g., deoxyribonucleotide regions; modified nucleotides such as base modifications, sugar modifications, nucleotide linkage modifications, and the like; etc). Also, to distinguish a guide RNA that interacts and guides a Cas9 protein (e.g., a Cas9 heterodimer) from other guide RNAs in the art, the term “Cas9 guide RNA” is herein used to refer to a guide RNA (and to modified guide RNAs having deoxyribonucleotides and/or other modifications) that interacts with a Cas9 protein (e.g., a Cas9 heterodimer) and targets the protein to a particular location (the target sequence) within a target nucleic acid.

[0374] A subject Cas9 guide RNA comprises two segments, a first segment (referred to herein as a “targeting segment”); and a second segment (referred to herein as a “protein-binding segment”). By “segment” it is meant a segment/section/region of a molecule, e.g., a contiguous stretch of nucleotides in a nucleic acid molecule. A segment can also mean a region/section of a complex such that a segment may comprise regions of more than one molecule.

[0375] The first segment (targeting segment) of a Cas9 guide RNA comprises a nucleotide sequence that is complementary to a specific sequence (a target site) within a target nucleic acid (e.g, a target ssRNA, a target ssDNA, the complementary strand of a double stranded target DNA, etc.). The protein-binding segment (or “protein-binding sequence”) interacts with a Cas9 polypeptide. Site-specific binding and/or cleavage of the target nucleic acid can occur at locations determined by base-pairing complementarity between the Cas9 guide RNA and the target nucleic acid.

[0376] The protein-binding segment of a subject Cas9 guide RNA comprises two complementary stretches of nucleotides that hybridize to one another to form a double stranded RNA duplex (dsRNA duplex).

[0377] A subject Cas9 guide RNA and a subject Cas9 heterodimer form a complex (i.e., bind via non-covalent interactions). The Cas9 guide RNA provides target specificity to the complex by comprising a nucleotide sequence that is complementary to a sequence of a target nucleic acid. The Cas9 heterodimer of the complex provides the site-specific activity. In other words, the Cas9 heterodimer is guided to a target nucleic acid sequence (e.g. a target sequence in a chromosomal nucleic acid; a target sequence in an extrachromosomal nucleic acid, e.g. an episomal nucleic acid, a minicircle, an ssRNA, an ssDNA, etc.; a target sequence in a mitochondrial nucleic acid; a target sequence in a chloroplast nucleic acid; a target sequence in a plasmid; etc.) by virtue of its association with the protein-binding segment of the Cas9 guide RNA.

[0378] The targeting sequence (the targeting segment) of a Cas9 guide RNA can be modified so that the Cas9 guide RNA can target a Cas9 heterodimer to any desired sequence of any desired target nucleic acid, with the exception (as is known in the art) that the PAM sequence is taken into account. Thus, for example, a Cas9 guide RNA can have a targeting segment with a sequence that can hybridize to a sequence in a eukaryotic nucleic acid (e.g., a eukaryotic chromosome, chromosomal sequence, a eukaryotic RNA, etc.).

[0379] In some embodiments, a subject Cas9 guide RNA comprises two separate nucleic acid molecules: an “activator” and a “targeter” and is referred to herein as a “dual Cas9 guide RNA”, a “double-molecule Cas9 guide RNA”, or a “two-molecule Cas9 guide RNA” a “dual guide RNA”, or a “dgRNA.” In some embodiments, the activator and targeter are covalently linked to one another (e.g., via intervening nucleotides) and the resulting guide RNA is referred to as a “single guide RNA”, a “single Cas9 guide RNA”, a “single-molecule Cas9 guide RNA,” or a “one-molecule Cas9 guide RNA”, or simply “sgRNA.”

[0380] As noted above, in some cases, a Cas9 guide RNA is a DNA/RNA hybrid molecule. In such cases, the protein-binding segment of the Cas9 guide RNA is RNA and forms an RNA duplex. However, the targeting segment of a Cas9 guide RNA can be DNA. Thus, if a DNA/RNA hybrid guide nucleic acid is a dual guide nucleic acid, the “targeter” molecule and be a hybrid molecule (e.g, the targeting segment can be DNA and the duplex-forming segment can be RNA). In such cases, the duplex-forming segment of the “activator” molecule can be RNA (e.g., in order to form an RNA-duplex with the duplex-forming segment of the targeter molecule), while nucleotides of the “activator” molecule that are outside of the duplex-forming segment can be DNA (in which case the activator molecule is a hybrid DNA/RNA molecule) or can be RNA (in which case the activator molecule is RNA). If a DNA/RNA hybrid guide nucleic acid is a single guide nucleic acid, then the targeting segment can be DNA, the duplex-forming segments (which make up the protein-binding segment) can be RNA, and nucleotides outside of the targeting and duplex-forming segments can be RNA or DNA. The “targeter” can also be referred to as a “targeter RNA” (even though in some cases a targeter RNA can have deoxyribonucleotides and/or other modifications) and the “activator” can be referred to as an “ativator RNA” (even though in some cases a targeter RNA can have deoxyribonucleotides and/or other modifications).

[0381] An example dual Cas9 guide RNA comprises a crRNA-like (“CRISPR RNA”/“targeter”/“crRNA”/“crRNA repeat”) molecule and a corresponding tracrRNA-like (“trans-acting CRISPR RNA”/“activator”/“tracrRNA”) molecule. A crRNA-like molecule (targeter) comprises both the targeting segment (single stranded) of the guide nucleic acid and a stretch (“duplex-forming segment”) of nucleotides that forms one half of the dsRNA duplex of the protein-binding segment of the Cas9 guide RNA. A corresponding tracrRNA-like molecule (activator/tracrRNA) comprises a stretch of nucleotides (duplex-forming segment) that forms the other half of the dsRNA duplex of the protein-binding segment of the guide nucleic acid. In other words, a stretch of nucleotides of a crRNA-like molecule are complementary to and hybridize with a stretch of nucleotides of a tracrRNA-like molecule to form the dsRNA duplex of the protein-binding domain of the Cas9 guide RNA. As such, each targeter molecule can be said to have a corresponding activator molecule (which has a region that hybridizes with the targeter). The targeter molecule additionally provides the single stranded targeting segment. Thus, a targeter and an activator molecule (as a corresponding pair) hybridize to form a dual Cas9 guide RNA. The exact sequence of a given crRNA or tracrRNA molecule is characteristic of the species in which the RNA molecules are found. A subject dual Cas9 guide RNA can include any corresponding activator and targeter pair.

[0382] The term “activator” is used herein to mean a tracrRNA-like molecule (tracrRNA: “trans-acting CRISPR RNA”) of a Cas9 dual guide RNA (and of a Cas9 single guide RNA when the “activator” and the “targeter” are linked together by, e.g., intervening nucleotides). Thus, for example, a Cas9 guide RNA (dgRNA or sgRNA) comprises an activator sequence (e.g., a tracrRNA sequence). As is known in the art a tracr molecule (a tracrRNA) is a naturally existing molecule that hybridizes with a CRISPR RNA molecule (a crRNA) to form a Cas9 dual guide RNA. The term “activator” is used herein to encompass naturally existing tracrRNAs, but also to encompass tracrRNAs with modifications (e.g, truncations, sequence variations, base modifications, backbone modifications, linkage modifications, etc.) where the activator retains at least one function of a tracrRNA (e.g., contributes to the dsRNA duplex to which Cas9 binds). In some cases the activator provides one or more stem loops that can interact with Cas9; in some cases, the activator contributes to the dsRNA duplex to which Cas9 binds (the dsRNA duplex formed from the hybridization of the targeter and the activator) and contributes stem loop 1; in some cases, contributes to the dsRNA duplex to which Cas9 binds (the dsRNA duplex formed from the hybridization of the targeter and the activator) and contributes stem loops 1 and 2; in some cases, contributes to the dsRNA duplex to which Cas9 binds (the dsRNA duplex formed from the hybridization of the targeter and the activator) and contributes stem loops land 3; in some cases, contributes to the dsRNA duplex to which Cas9 binds (the dsRNA duplex formed from the hybridization of the targeter and the activator) and contributes stem loops 1, 2, and 3; etc.). Thus, an activator can be referred to as having a tracr sequence (tracrRNA sequence) and in some cases is a tracrRNA, but the term “activator” is not limited to naturally existing tracrRNAs.

[0383] The term “targeter” is used herein to refer to a crRNA-like molecule (crRNA: “CRISPR RNA”) of a Cas9 dual guide RNA (and of a Cas9 single guide RNA when the “activator” and the “targeter” are linked together, e.g., by intervening nucleotides). Thus, for example, a Cas9 guide RNA (dgRNA or sgRNA) comprises a targeting segment (single stranded) (which comprises nucleotides that hybridize with a target nucleic acid, and a duplex-forming segment (e.g., a duplex forming segment of a crRNA, which can also be referred to as a crRNA repeat). Because the sequence of a targeting segment (the segment that hybridizes with a target sequence of a target nucleic acid) of a targeter is modified by a user to hybridize with a desired target nucleic acid, the sequence of a targeter will often be a non-naturally occurring sequence. However, the duplex-forming segment of a targeter (described in more detail below), which hybridizes with the duplex-forming segment of an activator, can include a naturally existing sequence (e.g., can include the sequence of a duplex-forming segment of a naturally existing crRNA, which can also be referred to as a crRNA repeat). Thus, the term targeter is used herein to distinguish from naturally occurring crRNAs, despite the fact that part of a targeter (e.g., the duplex-forming segment) can include a naturally occurring sequence from a crRNA. However, the term “targeter” encompasses naturally occurring crRNAs.

[0384] The term “duplex-forming segment” is used herein to refer to the stretch of nucleotides of an activator or a targeter that contributes to the formation of the dsRNA duplex by hybridizing to a stretch of nucleotides of a corresponding activator or targeter. In other words, an activator comprises a duplex-forming segment that is complementary to the duplex-forming segment of the corresponding targeter. As such, an activator comprises a duplex-forming segment while a targeter comprises both a duplex-forming segment and the targeting segment of the Cas9 guide RNA (sgRNA or dgRNA). A subject Cas9 single guide RNA comprises an “activator” and a “targeter” where the “activator” and the “targeter” are covalently linked (e.g., by intervening nucleotides). A subject Cas9 dual guide RNA comprises an “activator” and a “targeter” where the “activator” and the “targeter” are not covalently linked by intervening nucleotides.

[0385] A Cas9 guide RNA can also be said to include 3 parts: (i) a targeting sequence (a nucleotide sequence that hybridizes with a sequence of the target nucleic acid); (ii) an activator sequence (as described above)(in some cases, referred to as a tracr sequence); and (iii) a sequence that hybridizes to at least a portion of the activator sequence to form a double stranded duplex. A targeter has (i) and (iii); while an activator has (ii).

[0386] A Cas9 guide RNA (e.g. a dual guide RNA or a single guide RNA) can be comprised of any corresponding activator and targeter pair. Non-limiting examples of nucleotide sequences that can be included in a Cas9 guide RNA (dgRNA or sgRNA) include sequences set forth in SEQ ID NOs:431-679 and 1535-1544, or complements thereof. For example, in some cases, sequences from SEQ ID NOs: 431-562 and 1535-1544 (which are from tracrRNAs) or complements thereof, can pair with sequences from SEQ ID NOs: 563-679 (which are from crRNAs), or complements thereof, to form a dsRNA duplex of a protein binding segment.

[0387] As noted above, a targeter comprises both the targeting segment (single stranded) of the Cas9 guide RNA and a stretch (“duplex-forming segment”) of nucleotides that forms one half of the dsRNA duplex of the protein-binding segment of the Cas9 guide RNA. A corresponding tracrRNA-like molecule (activator) comprises a stretch of nucleotides (a duplex-forming segment) that forms the other half of the dsRNA duplex of the protein-binding segment of the Cas9 guide RNA. In other words, a stretch of nucleotides of the targeter is complementary to and hybridizes with a stretch of nucleotides of the activator to form the dsRNA duplex of the protein-binding segment of a Cas9 guide RNA. As such, each targeter can be said to have a corresponding activator (which has a region that hybridizes with the targeter). The targeter molecule additionally provides the single stranded targeting segment. Thus, a targeter and an activator (as a corresponding pair) hybridize to form a Cas9 guide RNA. The exact sequence of a given naturally existing crRNA or tracrRNA molecule is characteristic of the species in which the RNA molecules are found. Examples of suitable activator and targeter sequences include, but are not limited to, those set forth in SEQ ID NOs: 431-679 and 1535-1544. A subject Cas9 guide RNA (dgRNA or sgRNA) can include any corresponding activator and targeter sequence pair.

[0388] Targeting Segment of a Cas9 Guide RNA

[0389] The first segment of a subject guide nucleic acid comprises a nucleotide sequence that can be complementary to a sequence (a target site) in a target nucleic acid. In other words, the targeting segment of a subject guide nucleic acid can interact with a target nucleic acid (e.g., a single stranded RNA (ssRNA) and/or a single stranded DNA (ssDNA)) in a sequence-specific manner via hybridization (i.e., base pairing). As such, the nucleotide sequence of the targeting segment may vary and can determine the location within the target nucleic acid that the guide nucleic acid and the target nucleic acid will interact. The targeting segment of a Cas9 guide RNA can be modified (e.g., by genetic engineering)/designed to hybridize to any desired sequence (target site) within a target nucleic acid (e.g., a eukaryotic target nucleic acid).

[0390] The targeting segment can have a length of from about 12 nucleotides to about 100 nucleotides. For example, the targeting segment can have a length of from about 12 nucleotides (nt) to about 80 nt, from about 12 nt to about 50nt, from about 12 nt to about 40 nt, from about 12 nt to about 30 nt, from about 12 nt to about 25 nt, from about 12 nt to about 20 nt, or from about 12 nt to about 19 nt. For example, the targeting segment can have a length of from about 19 nt to about 20 nt, from about 19 nt to about 25 nt, from about 19 nt to about 30 nt, from about 19 nt to about 35 nt, from about 19 nt to about 40 nt, from about 19 nt to about 45 nt, from about 19 nt to about 50 nt, from about 19 nt to about 60 nt, from about 19 nt to about 70 nt, from about 19 nt to about 80 nt, from about 19 nt to about 90 nt, from about 19 nt to about 100 nt, from about 20 nt to about 25 nt, from about 20 nt to about 30 nt, from about 20 nt to about 35 nt, from about 20 nt to about 40 nt, from about 20 nt to about 45 nt, from about 20 nt to about 50 nt, from about 20 nt to about 60 nt, from about 20 nt to about 70 nt, from about 20 nt to about 80 nt, from about 20 nt to about 90 nt, or from about 20 nt to about 100 nt.

[0391] The nucleotide sequence (the targeting sequence) of the targeting segment that is complementary to a nucleotide sequence (target site) of the target nucleic acid can have a length of 12 nt or more. For example, the targeting sequence of the targeting segment that is complementary to a target site of the target nucleic acid can have a length of 12 nt or more, 15 nt or more, 18 nt or more, 19 nt or more, 20 nt or more, 25 nt or more, 30 nt or more, 35 nt or more or 40 nt. For example, the targeting sequence of the targeting segment that is complementary to a target sequence of the target nucleic acid can have a length of from about 12 nucleotides (nt) to about 80 nt, from about 12 nt to about 50nt, from about 12 nt to about 45 nt, from about 12 nt to about 40 nt, from about 12 nt to about 35 nt, from about 12 nt to about 30 nt, from about 12 nt to about 25 nt, from about 12 nt to about 20 nt, from about 12 nt to about 19 nt, from about 19 nt to about 20 nt, from about 19 nt to about 25 nt, from about 19 nt to about 30 nt, from about 19 nt to about 35 nt, from about 19 nt to about 40 nt, from about 19 nt to about 45 nt, from about 19 nt to about 50 nt, from about 19 nt to about 60 nt, from about 20 nt to about 25 nt, from about 20 nt to about 30 nt, from about 20 nt to about 35 nt, from about 20 nt to about 40 nt, from about 20 nt to about 45 nt, from about 20 nt to about 50 nt, or from about 20 nt to about 60 nt. The nucleotide sequence (the targeting sequence) of the targeting segment that is complementary to a nucleotide sequence (target site) of the target nucleic acid can have a length of 12 nt or more.

[0392] In some cases, the targeting sequence of the targeting segment that is complementary to a target site of the target nucleic acid is 20 nucleotides in length. In some cases, the targeting sequence of the targeting segment that is complementary to a target site of the target nucleic acid is 19 nucleotides in length.

[0393] In some cases, the targeting segment can have a length of 7 or more nucleotides (nt) (e.g., 8 or more, 9 or more, 10 or more, 12 or more, 15 or more, 20 or more, 25 or more, 30 or more, or 40 or more nucleotides). In some cases, the targeting segment can have a length of from 7 to 100 nucleotides (nt) (e.g., from 7 to 80 nt, from 7 to 60 nt, from 7 to 40 nt, from 7 to 30 nt, from 7 to 25 nt, from 7 to 22 nt, from 7 to 20 nt, from 7 to 18 nt, from 8 to 80 nt, from 8 to 60 nt, from 8 to 40 nt, from 8 to 30 nt, from 8 to 25 nt, from 8 to 22 nt, from 8 to 20 nt, from 8 to 18 nt, from 10 to 100 nt, from 10 to 80 nt, from 10 to 60 nt, from 10 to 40 nt, from 10 to 30 nt, from 10 to 25 nt, from 10 to 22 nt, from 10 to 20 nt, from 10 to 18 nt, from 12 to 100 nt, from 12 to 80 nt, from 12 to 60 nt, from 12 to 40 nt, from 12 to 30 nt, from 12 to 25 nt, from 12 to 22 nt, from 12 to 20 nt, from 12 to 18 nt, from 14 to 100 nt, from 14 to 80 nt, from 14 to 60 nt, from 14 to 40 nt, from 14 to 30 nt, from 14 to 25 nt, from 14 to 22 nt, from 14 to 20 nt, from 14 to 18 nt, from 16 to 100 nt, from 16 to 80 nt, from 16 to 60 nt, from 16 to 40 nt, from 16 to 30 nt, from 16 to 25 nt, from 16 to 22 nt, from 16 to 20 nt, from 16 to 18 nt, from 18 to 100 nt, from 18 to 80 nt, from 18 to 60 nt, from 18 to 40 nt, from 18 to 30 nt, from 18 to 25 nt, from 18 to 22 nt, from 18 to 20 nt, 18 nt, 19 nt, or 20 nt).

[0394] In some cases, the nucleotide sequence (the targeting sequence) of the targeting segment that is complementary to a nucleotide sequence (target site) of the target nucleic acid can have a length of 7 or more nucleotides (nt) (e.g., 8 or more, 9 or more, 10 or more, 12 or more, 15 or more, 20 or more, 25 or more, 30 or more, or 40 or more nucleotides). In some cases, the targeting sequence of the targeting segment that is complementary to a target sequence of the target nucleic acid can have a length of from 7 to 100 nucleotides (nt) (e.g., from 7 to 80 nt, from 7 to 60 nt, from 7 to 40 nt, from 7 to 30 nt, from 7 to 25 nt, from 7 to 22 nt, from 7 to 20 nt, from 7 to 18 nt, from 8 to 80 nt, from 8 to 60 nt, from 8 to 40 nt, from 8 to 30 nt, from 8 to 25 nt, from 8 to 22 nt, from 8 to 20 nt, from 8 to 18 nt, from 10 to 100 nt, from 10 to 80 nt, from 10 to 60 nt, from 10 to 40 nt, from 10 to 30 nt, from 10 to 25 nt, from 10 to 22 nt, from 10 to 20 nt, from 10 to 18 nt, from 12 to 100 nt, from 12 to 80 nt, from 12 to 60 nt, from 12 to 40 nt, from 12 to 30 nt, from 12 to 25 nt, from 12 to 22 nt, from 12 to 20 nt, from 12 to 18 nt, from 14 to 100 nt, from 14 to 80 nt, from 14 to 60 nt, from 14 to 40 nt, from 14 to 30 nt, from 14 to 25 nt, from 14 to 22 nt, from 14 to 20 nt, from 14 to 18 nt, from 16 to 100 nt, from 16 to 80 nt, from 16 to 60 nt, from 16 to 40 nt, from 16 to 30 nt, from 16 to 25 nt, from 16 to 22 nt, from 16 to 20 nt, from 16 to 18 nt, from 18 to 100 nt, from 18 to 80 nt, from 18 to 60 nt, from 18 to 40 nt, from 18 to 30 nt, from 18 to 25 nt, from 18 to 22 nt, from 18 to 20 nt, 18 nt, 19 nt, or 20 nt).

[0395] In some cases, the targeting sequence of the targeting segment that is complementary to a target site of the target nucleic acid is 20 nucleotides in length. In some cases, the targeting sequence of the targeting segment that is complementary to a target site of the target nucleic acid is 19 nucleotides in length.

[0396] The percent complementarity between the targeting sequence of the targeting segment and the target site of the target nucleic acid can be 60% or more (e.g., 65% or more, 70% or more, 75% or more, 80% or more, 85% or more, 90% or more, 95% or more, 97% or more, 98% or more, 99% or more, or 100%). In some cases, the percent complementarity between the targeting sequence of the targeting segment and the target site of the target nucleic acid is 100% over the seven contiguous 5′-most nucleotides of the target site of the target nucleic acid. In some cases, the percent complementarity between the targeting sequence of the targeting segment and the target site of the target nucleic acid is 60% or more over about 20 contiguous nucleotides. In some cases, the percent complementarity between the targeting sequence of the targeting segment and the target site of the target nucleic acid is 100% over the fourteen contiguous 5′-most nucleotides of the target site of the target nucleic acid and as low as 0% or more over the remainder. In such a case, the targeting sequence can be considered to be 14 nucleotides in length. In some cases, the percent complementarity between the targeting sequence of the targeting segment and the target site of the target nucleic acid is 100% over the seven contiguous 5′-most nucleotides of the target site of the target nucleic acid and as low as 0% or more over the remainder. In such a case, the targeting sequence can be considered to be 20 nucleotides in length.

[0397] In some cases, the percent complementarity between the targeting sequence of the targeting segment and the target site of the target nucleic acid is 100% over the 7 contiguous 5′-most nucleotides of the target site of the target nucleic acid (which can be complementary to the 3′-most nucleotides of the targeting sequence of the Cas9 guide RNA). In some cases, the percent complementarity between the targeting sequence of the targeting segment and the target site of the target nucleic acid is 100% over the 8 contiguous 5′-most nucleotides of the target site of the target nucleic acid (which can be complementary to the 3′-most nucleotides of the targeting sequence of the Cas9 guide RNA). In some cases, the percent complementarity between the targeting sequence of the targeting segment and the target site of the target nucleic acid is 100% over the 9 contiguous 5′-most nucleotides of the target site of the target nucleic acid (which can be complementary to the 3′-most nucleotides of the targeting sequence of the Cas9 guide RNA). In some cases, the percent complementarity between the targeting sequence of the targeting segment and the target site of the target nucleic acid is 100% over the 10 contiguous 5′-most nucleotides of the target site of the target nucleic acid (which can be complementary to the 3′-most nucleotides of the targeting sequence of the Cas9 guide RNA). In some cases, the percent complementarity between the targeting sequence of the targeting segment and the target site of the target nucleic acid is 60% or more (e.g., e.g., 65% or more, 70% or more, 75% or more, 80% or more, 85% or more, 90% or more, 95% or more, 97% or more, 98% or more, 99% or more, or 100%) over about 20 contiguous nucleotides.

[0398] In some cases, the percent complementarity between the targeting sequence of the targeting segment and the target site of the target nucleic acid is 100% over the 7 contiguous 5′-most nucleotides of the target site of the target nucleic acid and as low as 0% or more over the remainder. In such a case, the targeting sequence can be considered to be 7 nucleotides in length. In some cases, the percent complementarity between the targeting sequence of the targeting segment and the target site of the target nucleic acid is 100% over the 8 contiguous 5′-most nucleotides of the target site of the target nucleic acid and as low as 0% or more over the remainder. In such a case, the targeting sequence can be considered to be 8 nucleotides in length. In some cases, the percent complementarity between the targeting sequence of the targeting segment and the target site of the target nucleic acid is 100% over the 9 contiguous 5′-most nucleotides of the target site of the target nucleic acid and as low as 0% or more over the remainder. In such a case, the targeting sequence can be considered to be 9 nucleotides in length. In some cases, the percent complementarity between the targeting sequence of the targeting segment and the target site of the target nucleic acid is 100% over the 10 contiguous 5′-most nucleotides of the target site of the target nucleic acid and as low as 0% or more over the remainder. In such a case, the targeting sequence can be considered to be 10 nucleotides in length. In some cases, the percent complementarity between the targeting sequence of the targeting segment and the target site of the target nucleic acid is 100% over the 11 contiguous 5′-most nucleotides of the target site of the target nucleic acid and as low as 0% or more over the remainder. In such a case, the targeting sequence can be considered to be 11 nucleotides in length. In some cases, the percent complementarity between the targeting sequence of the targeting segment and the target site of the target nucleic acid is 100% over the 12 contiguous 5′-most nucleotides of the target site of the target nucleic acid and as low as 0% or more over the remainder. In such a case, the targeting sequence can be considered to be 12 nucleotides in length. In some cases, the percent complementarity between the targeting sequence of the targeting segment and the target site of the target nucleic acid is 100% over the 13 contiguous 5′-most nucleotides of the target site of the target nucleic acid and as low as 0% or more over the remainder. In such a case, the targeting sequence can be considered to be 13 nucleotides in length. In some cases, the percent complementarity between the targeting sequence of the targeting segment and the target site of the target nucleic acid is 100% over the 14 contiguous 5′-most nucleotides of the target site of the target nucleic acid and as low as 0% or more over the remainder. In such a case, the targeting sequence can be considered to be 14 nucleotides in length.

[0399] Second Segment: Protein-Binding Segment

[0400] The protein-binding segment of a subject guide nucleic acid interacts with a Cas9 polypeptide. The subject guide nucleic acid guides the bound polypeptide to a specific nucleotide sequence within target nucleic acid via the above mentioned targeting segment. The protein-binding segment of a subject guide nucleic acid comprises two stretches of nucleotides that are complementary to one another. The complementary nucleotides of the protein-binding segment hybridize to form a double stranded RNA duplex (dsRNA).

[0401] The protein-binding segment of a subject Cas9 guide RNA interacts with a Cas9 protein. The Cas9 guide RNA guides the bound Cas9 protein to a specific nucleotide sequence within target nucleic acid via the above mentioned targeting segment. The protein-binding segment of a Cas9 guide RNA comprises two stretches of nucleotides that are complementary to one another and hybridize to form a double stranded RNA duplex (dsRNA duplex). Thus, the protein-binding segment includes a dsRNA duplex. In some cases, the protein-binding segment also includes stem loop 1 (the “nexus”) of a Cas9 guide RNA (e.g., see FIG. 9). For example, in some cases, the activator of a Cas9 guide RNA (dgRNA or sgRNA) includes (i) a duplex forming segment that contributes to the dsRNA duplex of the protein-binding segment; and (ii) nucleotides 3′ of the duplex forming segment, e.g., that form stem loop 1 (the “nexus”). For example, in some cases, the protein-binding segment includes stem loop 1 (the “nexus”) of a Cas9 guide RNA. In some cases, the protein-binding segment includes 5 or more nucleotides (nt) (e.g., 6 or more, 7 or more, 8 or more, 9 or more, 10 or more, 11 or more, 12 or more, 15 or more, 20 or more, 30 or more, 40 or more, 50 or more, 60 or more, 70 or more, 75 or more, or 80 or more nt) 3′ of the dsRNA duplex (where 3′ is relative to the duplex-forming segment of the activator sequence).

[0402] The dsRNA duplex of the guide RNA (sgRNA or dgRNA) that forms between the activator and targeter is sometimes referred to herein as the “stem loop”. In addition, the activator (activator RNA, tracrRNA) of many naturally existing Cas9 guide RNAs (e.g., S. pygogenes guide RNAs) has 3 stem loops (3 hairpins) that are 3′ of the duplex-forming segment of the activator. The closest stem loop to the duplex-forming segment of the activator (3′ of the duplex forming segment) is called “stem loop 1” (and is also referred to herein as the “nexus”); the next stem loop is called “stem loop 2” (and is also referred to herein as the “hairpin 1”); and the next stem loop is called “stem loop 3” (and is also referred to herein as the “hairpin 2”). For example, see FIG. 9 for clarification of the nomenclature.

[0403] The term “truncated guide RNA”, as used herein, refers to a Cas9 guide RNA (single guide or dual guide) that has the nexus (“stem loop 1”), but is missing one or both of stem loops 2 and 3. Thus, a “truncated guide RNA” is truncated from the 3′ end of the activator and can have: (i) stem loop 1 only; (ii) stem loop 1 plus stem loop 2; or (iii) stem loop 1 plus stem loop 3. In some cases, a guide RNA (e.g., some naturally existing guide RNAs) have only one stem loop 3′ of the nexus (“stem loop 1”) and thus for purposes herein, such guide RNAs are referred to herein as having a nexus (“stem loop 1”) and a “stem loop 2/3” (or “hairpin 1/2”). For more information regarding guide RNAs, see Briner et al., Mol Cell. 2014 Oct. 23; 56(2):333-9, which is hereby incorporated by reference in its entirety.

[0404] Thus, the term “truncated guide RNA”, as used herein, refers to a Cas9 guide RNA (single guide or dual guide) that does not include one or both of: stem loop 2 and stem loop 3. In some cases, a Cas9 guide RNA (sgRNA or dgRNA) (a truncated Cas9 guide RNA) has stem loop 1, but does not have stem loop 2 and does not have stem loop 3. In some cases, a Cas9 guide RNA (sgRNA or dgRNA) (a truncated Cas9 guide RNA) has stem loop 1 and stem loop 2, but does not have stem loop 3. In some cases, a Cas9 guide RNA (sgRNA or dgRNA) (a truncated Cas9 guide RNA) has stem loop 1 and stem loop 3, but does not have stem loop 2. For example, in some cases, a Cas9 guide RNA (sgRNA or dgRNA) (a truncated Cas9 guide RNA) has stem loop 1, but does not have at least one of: stem loop 2 and stem loop 3. In some cases, a Cas9 guide RNA (sgRNA or dgRNA) (e.g., a full length Cas9 guide RNA) has stem loops 1, 2, and 3.

[0405] The inventors have discovered that in the presence of a Cas9 guide RNA having stem loops 1, 2, and 3 (e.g., a full length guide RNA), the nuclease lobe and the alpha-helical lobe of a split Cas9 protein (i.e., a Cas9 heterodimer) form a functional complex. Thus, complex formation between the nuclease lobe and the alpha-helical lobe does not require an additional dimerization mechanism (e.g., dimerization domains and/or dimerization inducers). However, in the presence of a Cas9 guide RNA that does not have stem loops 2 or 3 (a truncated guide RNA), the Cas9 heterodimer does not assemble (e.g, in the absence of a dimerizer such as light or a dimerizing agent). As such, when one wishes to control the assembly of a Cas9 heterodimer, one can use a Cas9 heterdimer having a dimerizer pair as fusion partners (e.g., in which the nuclease lobe includes a first member of a dimer pair and the alpha-helical lobe includes a second member the dimer pair), in the presence of a truncated Cas9 guide RNA (a Cas9 guide RNA that does not include stem loops 2 or 3 but does include stem loop 1; a guide RNA that does not include stem loop 2 but does include stem loops 1 and 3; and/or a guide RNA that does not include stem loop 3 but does include stem loops 1 and 2). Thus, complex formation of the nuclease lobe and the alpha-helical lobe to form a functional Cas9 complex can be induced by using the proper inducing agent.

[0406] Thus, in some cases, an activator (of a Cas9 guide RNA) has stem loop 1, but does not have stem loop 2 and does not have stem loop 3. In some cases, an activator (of a Cas9 guide RNA) has stem loop 1 and stem loop 2, but does not have stem loop 3. In some cases, an activator (of a Cas9 guide RNA) has stem loop 1 and stem loop 3, but does not have stem loop 2. In some cases, an activator (of a Cas9 guide RNA) has stem loops 1, 2, and 3. For example, in some cases, an activator (of a Cas9 guide RNA) has stem loop 1, but does not have at least one of: stem loop 2 and stem loop 3.

[0407] In some cases, the activator (e.g., tracr sequence) of a Cas9 guide RNA (dgRNA or sgRNA) includes (i) a duplex forming segment that contributes to the dsRNA duplex of the protein-binding segment; and (ii) nucleotides 3′ of the duplex forming segment (and therefore the Cas9 guide RNA includes (ii)). In some cases, the additional nucleotides 3′ of the duplex forming segment form stem loop 1. In some cases, the activator (e.g., tracr sequence) of a Cas9 guide RNA (dgRNA or sgRNA) includes (i) a duplex forming segment that contributes to the dsRNA duplex of the protein-binding segment; and (ii) 5 or more nucleotides (e.g., 6 or more, 7 or more, 8 or more, 9 or more, 10 or more, 11 or more, 12 or more, 13 or more, 14 or more, 15 or more, 20 or more, 25 or more, 30 or more, 35 or more, 40 or more, 45 or more, 50 or more, 60 or more, 70 or more, or 75 or more nucleotides) 3′ of the duplex forming segment (and therefore the Cas9 guide RNA includes (ii)). In some cases, the activator of a Cas9 guide RNA (dgRNA or sgRNA) includes (i) a duplex forming segment that contributes to the dsRNA duplex of the protein-binding segment; and (ii) 5 or more nucleotides (e.g., 6 or more, 7 or more, 8 or more, 9 or more, 10 or more, 11 or more, 12 or more, 13 or more, 14 or more, 15 or more, 20 or more, 25 or more, 30 or more, 35 or more, 40 or more, 45 or more, 50 or more, 60 or more, 70 or more, or 75 or more nucleotides) 3′ of the duplex forming segment (and therefore the Cas9 guide RNA includes (ii)).

[0408] In some cases, the activator (e.g., tracr sequence) of a Cas9 guide RNA (dgRNA or sgRNA) includes (i) a duplex forming segment that contributes to the dsRNA duplex of the protein-binding segment; and (ii) a stretch of nucleotides (e.g., referred to herein as a 3′ tail) 3′ of the duplex forming segment (and therefore the Cas9 guide RNA includes (ii)). In some cases, the stretch of nucleotides 3′ of the duplex forming segment has a length in a range of from 5 to 200 nucleotides (nt) (e.g., from 5 to 150 nt, from 5 to 130 nt, from 5 to 120 nt, from 5 to 100 nt, from 5 to 80 nt, from 10 to 200 nt, from 10 to 150 nt, from 10 to 130 nt, from 10 to 120 nt, from 10 to 100 nt, from 10 to 80 nt, from 12 to 200 nt, from 12 to 150 nt, from 12 to 130 nt, from 12 to 120 nt, from 12 to 100 nt, from 12 to 80 nt, from 15 to 200 nt, from 15 to 150 nt, from 15 to 130 nt, from 15 to 120 nt, from 15 to 100 nt, from 15 to 80 nt, from 20 to 200 nt, from 20 to 150 nt, from 20 to 130 nt, from 20 to 120 nt, from 20 to 100 nt, from 20 to 80 nt, from 30 to 200 nt, from 30 to 150 nt, from 30 to 130 nt, from 30 to 120 nt, from 30 to 100 nt, or from 30 to 80 nt).

[0409] In some embodiments, the duplex-forming segment of the activator is 60% or more identical to one of the activator (tracrRNA) molecules set forth in SEQ ID NOs:431-562, and 1535-1544, or a complement thereof, over a stretch of 8 or more contiguous nucleotides (e.g., 8 or more contiguous nucleotides, 10 or more contiguous nucleotides, 12 or more contiguous nucleotides, 15 or more contiguous nucleotides, or 20 or more contiguous nucleotides). For example, the duplex-forming segment of the activator (or the DNA encoding the duplex-forming segment of the activator) can be 65% or more identical to one of the tracrRNA sequences set forth in SEQ ID NOs:431-562, and 1535-1544, or a complement thereof, over a stretch of 8 or more contiguous nucleotides (e.g., 8 or more contiguous nucleotides, 10 or more contiguous nucleotides, 12 or more contiguous nucleotides, 15 or more contiguous nucleotides, or 20 or more contiguous nucleotides). The duplex-forming segment of the activator (or the DNA encoding the duplex-forming segment of the activator) can be 70% or more identical to one of the tracrRNA sequences set forth in SEQ ID NOs:431-562, and 1535-1544, or a complement thereof, over a stretch of 8 or more contiguous nucleotides (e.g., 8 or more contiguous nucleotides, 10 or more contiguous nucleotides, 12 or more contiguous nucleotides, 15 or more contiguous nucleotides, or 20 or more contiguous nucleotides). The duplex-forming segment of the activator (or the DNA encoding the duplex-forming segment of the activator) can be 75% or more identical to one of the tracrRNA sequences set forth in SEQ ID NOs:431-562, and 1535-1544, or a complement thereof, over a stretch of 8 or more contiguous nucleotides (e.g., 8 or more contiguous nucleotides, 10 or more contiguous nucleotides, 12 or more contiguous nucleotides, 15 or more contiguous nucleotides, or 20 or more contiguous nucleotides). The duplex-forming segment of the activator (or the DNA encoding the duplex-forming segment of the activator) can be 80% or more identical to one of the tracrRNA sequences set forth in SEQ ID NOs:431-562, and 1535-1544, or a complement thereof, over a stretch of 8 or more contiguous nucleotides (e.g., 8 or more contiguous nucleotides, 10 or more contiguous nucleotides, 12 or more contiguous nucleotides, 15 or more contiguous nucleotides, or 20 or more contiguous nucleotides). The duplex-forming segment of the activator (or the DNA encoding the duplex-forming segment of the activator) can be 85% or more identical to one of the tracrRNA sequences set forth in SEQ ID NOs:431-562, and 1535-1544, or a complement thereof, over a stretch of 8 or more contiguous nucleotides (e.g., 8 or more contiguous nucleotides, 10 or more contiguous nucleotides, 12 or more contiguous nucleotides, 15 or more contiguous nucleotides, or 20 or more contiguous nucleotides). The duplex-forming segment of the activator (or the DNA encoding the duplex-forming segment of the activator) can be 90% or more identical to one of the tracrRNA sequences set forth in SEQ ID NOs:431-562, and 1535-1544, or a complement thereof, over a stretch of 8 or more contiguous nucleotides (e.g., 8 or more contiguous nucleotides, 10 or more contiguous nucleotides, 12 or more contiguous nucleotides, 15 or more contiguous nucleotides, or 20 or more contiguous nucleotides). The duplex-forming segment of the activator (or the DNA encoding the duplex-forming segment of the activator) can be 95% or more identical to one of the tracrRNA sequences set forth in SEQ ID NOs:431-562, and 1535-1544, or a complement thereof, over a stretch of 8 or more contiguous nucleotides (e.g., 8 or more contiguous nucleotides, 10 or more contiguous nucleotides, 12 or more contiguous nucleotides, 15 or more contiguous nucleotides, or 20 or more contiguous nucleotides). The duplex-forming segment of the activator (or the DNA encoding the duplex-forming segment of the activator) can be 98% or more identical to one of the tracrRNA sequences set forth in SEQ ID NOs:431-562, and 1535-1544, or a complement thereof, over a stretch of 8 or more contiguous nucleotides (e.g., 8 or more contiguous nucleotides, 10 or more contiguous nucleotides, 12 or more contiguous nucleotides, 15 or more contiguous nucleotides, or 20 or more contiguous nucleotides). The duplex-forming segment of the activator (or the DNA encoding the duplex-forming segment of the activator) can be 99% or more identical to one of the tracrRNA sequences set forth in SEQ ID NOs:431-562, and 1535-1544, or a complement thereof, over a stretch of 8 or more contiguous nucleotides (e.g., 8 or more contiguous nucleotides, 10 or more contiguous nucleotides, 12 or more contiguous nucleotides, 15 or more contiguous nucleotides, or 20 or more contiguous nucleotides). The duplex-forming segment of the activator (or the DNA encoding the duplex-forming segment of the activator) can be 100% identical to one of the tracrRNA sequences set forth in SEQ ID NOs:431-562, and 1535-1544, or a complement thereof, over a stretch of 8 or more contiguous nucleotides (e.g., 8 or more contiguous nucleotides, 10 or more contiguous nucleotides, 12 or more contiguous nucleotides, 15 or more contiguous nucleotides, or 20 or more contiguous nucleotides).

[0410] In some embodiments, the duplex-forming segment of the targeter is 60% or more identical to one of the targeter (crRNA) sequences set forth in SEQ ID NOs:563-679, or a complement thereof, over a stretch of 8 or more contiguous nucleotides (e.g., 8 or more contiguous nucleotides, 10 or more contiguous nucleotides, 12 or more contiguous nucleotides, 15 contig or more contiguous nucleotides, or 20 or more contiguous nucleotides). For example, the duplex-forming segment of the targeter (or the DNA encoding the duplex-forming segment of the targeter) can be 65% or more identical to one of the crRNA sequences set forth in SEQ ID NOs:563-679, or a complement thereof, over a stretch of 8 or more contiguous nucleotides (e.g., 8 or more contiguous nucleotides, 10 or more contiguous nucleotides, 12 or more contiguous nucleotides, 15 or more contiguous nucleotides, or 20 or more contiguous nucleotides). The duplex-forming segment of the targeter (or the DNA encoding the duplex-forming segment of the targeter) can be 70% or more identical to one of the crRNA sequences set forth in SEQ ID NOs:563-679, or a complement thereof, over a stretch of 8 or more contiguous nucleotides (e.g., 8 or more contiguous nucleotides, 10 or more contiguous nucleotides, 12 or more contiguous nucleotides, 15 or more contiguous nucleotides, or 20 or more contiguous nucleotides). The duplex-forming segment of the targeter (or the DNA encoding the duplex-forming segment of the targeter) can be 75% or more identical to one of the crRNA sequences set forth in SEQ ID NOs:563-679, or a complement thereof, over a stretch of 8 or more contiguous nucleotides (e.g., 8 or more contiguous nucleotides, 10 or more contiguous nucleotides, 12 or more contiguous nucleotides, 15 or more contiguous nucleotides, or 20 or more contiguous nucleotides). The duplex-forming segment of the targeter (or the DNA encoding the duplex-forming segment of the targeter) can be 80% or more identical to one of the crRNA sequences set forth in SEQ ID NOs:563-679, or a complement thereof, over a stretch of 8 or more contiguous nucleotides (e.g., 8 or more contiguous nucleotides, 10 or more contiguous nucleotides, 12 or more contiguous nucleotides, 15 or more contiguous nucleotides, or 20 or more contiguous nucleotides). The duplex-forming segment of the targeter (or the DNA encoding the duplex-forming segment of the targeter) can be 85% or more identical to one of the crRNA sequences set forth in SEQ ID NOs:563-679, or a complement thereof, over a stretch of 8 or more contiguous nucleotides (e.g., 8 or more contiguous nucleotides, 10 or more contiguous nucleotides, 12 or more contiguous nucleotides, 15 or more contiguous nucleotides, or 20 or more contiguous nucleotides). The duplex-forming segment of the targeter (or the DNA encoding the duplex-forming segment of the targeter) can be 90% or more identical to one of the crRNA sequences set forth in SEQ ID NOs:563-679, or a complement thereof, over a stretch of 8 or more contiguous nucleotides (e.g., 8 or more contiguous nucleotides, 10 or more contiguous nucleotides, 12 or more contiguous nucleotides, 15 or more contiguous nucleotides, or 20 or more contiguous nucleotides). The duplex-forming segment of the targeter (or the DNA encoding the duplex-forming segment of the targeter) can be 95% or more identical to one of the crRNA sequences set forth in SEQ ID NOs:563-679, or a complement thereof, over a stretch of 8 or more contiguous nucleotides (e.g., 8 or more contiguous nucleotides, 10 or more contiguous nucleotides, 12 or more contiguous nucleotides, 15 or more contiguous nucleotides, or 20 or more contiguous nucleotides). The duplex-forming segment of the targeter (or the DNA encoding the duplex-forming segment of the targeter) can be 98% or more identical to one of the crRNA sequences set forth in SEQ ID NOs:563-679, or a complement thereof, over a stretch of 8 or more contiguous nucleotides (e.g., 8 or more contiguous nucleotides, 10 or more contiguous nucleotides, 12 or more contiguous nucleotides, 15 or more contiguous nucleotides, or 20 or more contiguous nucleotides). The duplex-forming segment of the targeter (or the DNA encoding the duplex-forming segment of the targeter) can be 99% or more identical to one of the crRNA sequences set forth in SEQ ID NOs:563-679, or a complement thereof, over a stretch of 8 or more contiguous nucleotides (e.g., 8 or more contiguous nucleotides, 10 or more contiguous nucleotides, 12 or more contiguous nucleotides, 15 or more contiguous nucleotides, or 20 or more contiguous nucleotides). The duplex-forming segment of the targeter (or the DNA encoding the duplex-forming segment of the targeter) can be 100% identical to one of the crRNA sequences set forth in SEQ ID NOs:563-679, or a complement thereof, over a stretch of 8 or more contiguous nucleotides (e.g., 8 or more contiguous nucleotides, 10 or more contiguous nucleotides, 12 or more contiguous nucleotides, 15 or more contiguous nucleotides, or 20 or more contiguous nucleotides).

[0411] A dual guide RNA can be designed to allow for controlled (i.e., conditional) binding of a targeter with an activator. Because a Cas9 dual guide RNA is not functional unless both the activator and the targeter are bound in a functional complex with Cas9, a dual guide RNA can be inducible (e.g., drug inducible) by rendering the binding between the activator and the targeter to be inducible. As one non-limiting example, RNA aptamers can be used to regulate (i.e., control) the binding of the activator with the targeter. Accordingly, the activator and/or the targeter can include an RNA aptamer sequence.

[0412] Aptamers (e.g., RNA aptamers) are known in the art and are generally a synthetic version of a riboswitch. The terms “RNA aptamer” and “riboswitch” are used interchangeably herein to encompass both synthetic and natural nucleic acid sequences that provide for inducible regulation of the structure (and therefore the availability of specific sequences) of the nucleic acid molecule (e.g., RNA, DNA/RNA hybrid, etc.) of which they are part. RNA aptamers usually comprise a sequence that folds into a particular structure (e.g., a hairpin), which specifically binds a particular drug (e.g., a small molecule). Binding of the drug causes a structural change in the folding of the RNA, which changes a feature of the nucleic acid of which the aptamer is a part. As non-limiting examples: (i) an activator with an aptamer may not be able to bind to the cognate targeter unless the aptamer is bound by the appropriate drug; (ii) a targeter with an aptamer may not be able to bind to the cognate activator unless the aptamer is bound by the appropriate drug; and (iii) a targeter and an activator, each comprising a different aptamer that binds a different drug, may not be able to bind to each other unless both drugs are present. As illustrated by these examples, a Cas9 dual guide RNA can be designed to be inducible.

[0413] Examples of aptamers and riboswitches can be found, for example, in: Nakamura et al., Genes Cells. 2012 May; 17(5):344-64; Vavalle et al., Future Cardiol. 2012 May; 8(3):371-82; Citartan et al., Biosens Bioelectron. 2012 Apr. 15; 34(1):1-11; and Liberman et al., Wiley Interdiscip Rev RNA. 2012 May-June; 3(3):369-84; all of which are herein incorporated by reference in their entirety.

[0414] A Cas9 single guide RNA comprises two stretches of nucleotides (a “targeter” and an “activator”) that are complementary to one another, hybridize to form the double stranded RNA duplex (dsRNA duplex) of the protein-binding segment (thus resulting in a stem-loop structure), and are covalently linked, e.g., by a linker of intervening nucleotides (“linker nucleotides”). Thus, a subject single Cas9 guide RNA (e.g., a single guide RNA) can comprise a targeter and an activator, each having a duplex-forming segment, where the duplex-forming segments of the targeter and the activator hybridize with one another to form a dsRNA duplex. The targeter and the activator can be covalently linked via the 3′ end of the targeter and the 5′ end of the activator. Alternatively, targeter and the activator can be covalently linked via the 5′ end of the targeter and the 3′ end of the activator.

[0415] The linker of a Cas9 single guide RNA can have a length of from 3 nucleotides to 100 nucleotides. For example, the linker can have a length of from 3 nucleotides (nt) to 90 nt, from 3 nucleotides (nt) to 80 nt, from 3 nucleotides (nt) to 70 nt, from 3 nucleotides (nt) to 60 nt, from 3 nucleotides (nt) to 50 nt, from 3 nucleotides (nt) to 40 nt, from 3 nucleotides (nt) to 30 nt, from 3 nucleotides (nt) to 20 nt or from 3 nucleotides (nt) to 10 nt. For example, the linker can have a length of from 3 nt to 5 nt, from 5 nt to 10 nt, from 10 nt to 15 nt, from 15 nt to 20 nt, from 20 nt to 25 nt, from 25 nt to 30 nt, from 30 nt to 35 nt, from 35 nt to 40 nt, from 40 nt to 50 nt, from 50 nt to 60 nt, from 60 nt to 70 nt, from 70 nt to 80 nt, from 80 nt to 90 nt, or from 90 nt to 100 nt. In some embodiments, the linker of a Cas9 single guide RNA is 4 nt.

[0416] A single Cas9 guide RNA comprises two complementary stretches of nucleotides (a targeter and an activator) that hybridize to form a dsRNA duplex. In some embodiments, one of the two complementary stretches of nucleotides of the single Cas9 guide RNA (or the DNA encoding the stretch) is 60% or more identical to one of the activator (tracrRNA) molecules set forth in SEQ ID NOs:431-562, or a complement thereof, over a stretch of 8 or more contiguous nucleotides (e.g., 8 or more contiguous nucleotides, 10 or more contiguous nucleotides, 12 or more contiguous nucleotides, 15 or more contiguous nucleotides, or 20 or more contiguous nucleotides). For example, one of the two complementary stretches of nucleotides of the single Cas9 guide RNA (or the DNA encoding the stretch) is 65% or more identical, 70% or more identical, 75% or more identical, 80% or more identical, 85% or more identical, 90% or more identical, 95% or more identical, 98% or more identical, 99% or more identical or 100% identical to one of the tracrRNA sequences set forth in SEQ ID NOs:431-562, or a complement thereof, over a stretch of 8 or more contiguous nucleotides (e.g., 8 or more contiguous nucleotides, 10 or more contiguous nucleotides, 12 or more contiguous nucleotides, 15 or more contiguous nucleotides, or 20 or more contiguous nucleotides).

[0417] In some embodiments, one of the two complementary stretches of nucleotides of the single Cas9 guide RNA (or the DNA encoding the stretch) is 60% or more identical to one of the targeter (crRNA) sequences set forth in SEQ ID NOs:563-679, or a complement thereof, over a stretch of 8 or more contiguous nucleotides (e.g., 8 or more contiguous nucleotides, 10 or more contiguous nucleotides, 12 or more contiguous nucleotides, 15 or more contiguous nucleotides, or 20 or more contiguous nucleotides). For example, one of the two complementary stretches of nucleotides of the single Cas9 guide RNA (or the DNA encoding the stretch) is 65% or more identical, 70% or more identical, 75% or more identical, 80% or more identical, 85% or more identical, 90% or more identical, 95% or more identical, 98% or more identical, 99% or more identical or 100% identical to one of the crRNA sequences set forth in SEQ ID NOs:563-679, or a complement thereof, over a stretch of 8 or more contiguous nucleotides (e.g., 8 or more contiguous nucleotides, 10 or more contiguous nucleotides, 12 or more contiguous nucleotides, 15 or more contiguous nucleotides, or 20 or more contiguous nucleotides).

[0418] In some embodiments, one of the two complementary stretches of nucleotides of the single Cas9 guide RNA (or the DNA encoding the stretch) is 60% or more identical to one of the targeter (crRNA) sequences or activator (tracrRNA) sequences set forth in SEQ ID NOs: 431-679, or a complement thereof, over a stretch of 8 or more contiguous nucleotides (e.g., 8 or more contiguous nucleotides, 10 or more contiguous nucleotides, 12 or more contiguous nucleotides, 15 or more contiguous nucleotides, or 20 or more contiguous nucleotides). For example, one of the two complementary stretches of nucleotides of the single Cas9 guide RNA (or the DNA encoding the stretch) can be 65% or more identical to one of the sequences set forth in SEQ ID NOs: 431-679, or a complement thereof, over a stretch of 8 or more contiguous nucleotides (e.g., 8 or more contiguous nucleotides, 10 or more contiguous nucleotides, 12 or more contiguous nucleotides, 15 or more contiguous nucleotides, or 20 or more contiguous nucleotides).

[0419] One of the two complementary stretches of nucleotides of the single Cas9 guide RNA (or the DNA encoding the stretch) can be 70% or more identical to one of the sequences set forth in SEQ ID NOs: 431-679, or a complement thereof, over a stretch of 8 or more contiguous nucleotides (e.g., 8 or more contiguous nucleotides, 10 or more contiguous nucleotides, 12 or more contiguous nucleotides, 15 or more contiguous nucleotides, or 20 or more contiguous nucleotides).

[0420] One of the two complementary stretches of nucleotides of the single Cas9 guide RNA (or the DNA encoding the stretch) can be 75% or more identical to one of the sequences set forth in SEQ ID NOs: 431-679, or a complement thereof, over a stretch of 8 or more contiguous nucleotides (e.g., 8 or more contiguous nucleotides, 10 or more contiguous nucleotides, 12 or more contiguous nucleotides, 15 or more contiguous nucleotides, or 20 or more contiguous nucleotides)

[0421] One of the two complementary stretches of nucleotides of the single Cas9 guide RNA (or the DNA encoding the stretch) can be 80% or more identical to one of the sequences set forth in SEQ ID NOs: 431-679, or a complement thereof, over a stretch of 8 or more contiguous nucleotides (e.g., 8 or more contiguous nucleotides, 10 or more contiguous nucleotides, 12 or more contiguous nucleotides, 15 or more contiguous nucleotides, or 20 or more contiguous nucleotides).

[0422] One of the two complementary stretches of nucleotides of the single Cas9 guide RNA (or the DNA encoding the stretch) can be 85% or more identical to one of the sequences set forth in SEQ ID NOs: 431-679, or a complement thereof, over a stretch of 8 or more contiguous nucleotides (e.g., 8 or more contiguous nucleotides, 10 or more contiguous nucleotides, 12 or more contiguous nucleotides, 15 or more contiguous nucleotides, or 20 or more contiguous nucleotides).

[0423] One of the two complementary stretches of nucleotides of the single Cas9 guide RNA (or the DNA encoding the stretch) can be 90% or more identical to one of the sequences set forth in SEQ ID NOs: 431-679, or a complement thereof, over a stretch of 8 or more contiguous nucleotides (e.g., 8 or more contiguous nucleotides, 10 or more contiguous nucleotides, 12 or more contiguous nucleotides, 15 or more contiguous nucleotides, or 20 or more contiguous nucleotides).

[0424] One of the two complementary stretches of nucleotides of the single Cas9 guide RNA (or the DNA encoding the stretch) can be 95% or more identical to one of the sequences set forth in SEQ ID NOs: 431-679, or a complement thereof, over a stretch of 8 or more contiguous nucleotides (e.g., 8 or more contiguous nucleotides, 10 or more contiguous nucleotides, 12 or more contiguous nucleotides, 15 or more contiguous nucleotides, or 20 or more contiguous nucleotides).

[0425] One of the two complementary stretches of nucleotides of the single Cas9 guide RNA (or the DNA encoding the stretch) can be 98% or more identical to one of the sequences set forth in SEQ ID NOs: 431-679, or a complement thereof, over a stretch of 8 or more contiguous nucleotides (e.g., 8 or more contiguous nucleotides, 10 or more contiguous nucleotides, 12 or more contiguous nucleotides, 15 or more contiguous nucleotides, or 20 or more contiguous nucleotides).

[0426] One of the two complementary stretches of nucleotides of the single Cas9 guide RNA (or the DNA encoding the stretch) can be 99% or more identical to one of the sequences set forth in SEQ ID NOs: 431-679, or a complement thereof, over a stretch of 8 or more contiguous nucleotides (e.g., 8 or more contiguous nucleotides, 10 or more contiguous nucleotides, 12 or more contiguous nucleotides, 15 or more contiguous nucleotides, or 20 or more contiguous nucleotides).

[0427] One of the two complementary stretches of nucleotides of the single Cas9 guide RNA (or the DNA encoding the stretch) can be 100% identical to one of the sequences set forth in SEQ ID NOs: 431-679, or a complement thereof, over a stretch of 8 or more contiguous nucleotides (e.g., 8 or more contiguous nucleotides, 10 or more contiguous nucleotides, 12 or more contiguous nucleotides, 15 or more contiguous nucleotides, or 20 or more contiguous nucleotides).

[0428] Appropriate cognate pairs of targeters and activators can be routinely determined for SEQ ID NOs:431-679 by taking into account the species name and base-pairing (for the dsRNA duplex of the protein-binding domain) Any activator/targeter pair can be used as part of subject dual Cas9 guide RNA or as part of a subject single Cas9 guide RNA.

[0429] In some embodiments, one of the two complementary stretches of nucleotides (that hybridize to form the dsRNA duplex of the protein-binding segment) of the Cas9 single guide RNA (or the DNA encoding the stretch) is 60% or more identical to one of the activator (tracrRNA) molecules set forth in SEQ ID NOs:431-562, and 1535-1544, or a complement thereof, over a stretch of 8 or more contiguous nucleotides (e.g., 8 or more contiguous nucleotides, 10 or more contiguous nucleotides, 12 or more contiguous nucleotides, 15 or more contiguous nucleotides, or 20 or more contiguous nucleotides). For example, one of the two complementary stretches of nucleotides of the Cas9 single guide RNA (or the DNA encoding the stretch) is 65% or more identical, 70% or more identical, 75% or more identical, 80% or more identical, 85% or more identical, 90% or more identical, 95% or more identical, 98% or more identical, 99% or more identical or 100% identical to one of the tracrRNA sequences set forth in SEQ ID NOs:431-562, and 1535-1544, or a complement thereof, over a stretch of 8 or more contiguous nucleotides (e.g., 8 or more contiguous nucleotides, 10 or more contiguous nucleotides, 12 or more contiguous nucleotides, 15 or more contiguous nucleotides, or 20 or more contiguous nucleotides).

[0430] In some embodiments, one of the two complementary stretches of nucleotides (that hybridize to form the dsRNA duplex of the protein-binding segment) of the Cas9 single guide RNA (or the DNA encoding the stretch) is 60% or more identical to one of the targeter (crRNA) sequences set forth in SEQ ID NOs:563-679, or a complement thereof, over a stretch of 8 or more contiguous nucleotides (e.g., 8 or more contiguous nucleotides, 10 or more contiguous nucleotides, 12 or more contiguous nucleotides, 15 or more contiguous nucleotides, or 20 or more contiguous nucleotides). For example, one of the two complementary stretches of nucleotides of the Cas9 single guide RNA (or the DNA encoding the stretch) is 65% or more identical, 70% or more identical, 75% or more identical, 80% or more identical, 85% or more identical, 90% or more identical, 95% or more identical, 98% or more identical, 99% or more identical or 100% identical to one of the crRNA sequences set forth in SEQ ID NOs:563-679, or a complement thereof, over a stretch of 8 or more contiguous nucleotides (e.g., 8 or more contiguous nucleotides, 10 or more contiguous nucleotides, 12 or more contiguous nucleotides, 15 or more contiguous nucleotides, or 20 or more contiguous nucleotides).

[0431] In some embodiments, one of the two complementary stretches of nucleotides (that hybridize to form the dsRNA duplex of the protein-binding segment) of the Cas9 single guide RNA (or the DNA encoding the stretch) is 60% or more identical to one of the targeter (crRNA) sequences or activator (tracrRNA) sequences set forth in SEQ ID NOs: 431-679, and 1535-1544, or a complement thereof, over a stretch of 8 or more contiguous nucleotides (e.g., 8 or more contiguous nucleotides, 10 or more contiguous nucleotides, 12 or more contiguous nucleotides, 15 or more contiguous nucleotides, or 20 or more contiguous nucleotides). For example, one of the two complementary stretches of nucleotides of the Cas9 single guide RNA (or the DNA encoding the stretch) can be 65% or more identical to one of the sequences set forth in SEQ ID NOs: 431-679, and 1535-1544, or a complement thereof, over a stretch of 8 or more contiguous nucleotides (e.g., 8 or more contiguous nucleotides, 10 or more contiguous nucleotides, 12 or more contiguous nucleotides, 15 or more contiguous nucleotides, or 20 or more contiguous nucleotides). One of the two complementary stretches of nucleotides of the Cas9 single guide RNA (or the DNA encoding the stretch) can be 70% or more identical to one of the sequences set forth in SEQ ID NOs: 431-679, and 1535-1544, or a complement thereof, over a stretch of 8 or more contiguous nucleotides (e.g., 8 or more contiguous nucleotides, 10 or more contiguous nucleotides, 12 or more contiguous nucleotides, 15 or more contiguous nucleotides, or 20 or more contiguous nucleotides). One of the two complementary stretches of nucleotides of the Cas9 single guide RNA (or the DNA encoding the stretch) can be 75% or more identical to one of the sequences set forth in SEQ ID NOs: 431-679, and 1535-1544, or a complement thereof, over a stretch of 8 or more contiguous nucleotides (e.g., 8 or more contiguous nucleotides, 10 or more contiguous nucleotides, 12 or more contiguous nucleotides, 15 or more contiguous nucleotides, or 20 or more contiguous nucleotides)One of the two complementary stretches of nucleotides of the Cas9 single guide RNA (or the DNA encoding the stretch) can be 80% or more identical to one of the sequences set forth in SEQ ID NOs: 431-679, and 1535-1544, or a complement thereof, over a stretch of 8 or more contiguous nucleotides (e.g., 8 or more contiguous nucleotides, 10 or more contiguous nucleotides, 12 or more contiguous nucleotides, 15 or more contiguous nucleotides, or 20 or more contiguous nucleotides). One of the two complementary stretches of nucleotides of the Cas9 single guide RNA (or the DNA encoding the stretch) can be 85% or more identical to one of the sequences set forth in SEQ ID NOs: 431-679, and 1535-1544, or a complement thereof, over a stretch of 8 or more contiguous nucleotides (e.g., 8 or more contiguous nucleotides, 10 or more contiguous nucleotides, 12 or more contiguous nucleotides, 15 or more contiguous nucleotides, or 20 or more contiguous nucleotides). One of the two complementary stretches of nucleotides of the Cas9 single guide RNA (or the DNA encoding the stretch) can be 90% or more identical to one of the sequences set forth in SEQ ID NOs: 431-679, and 1535-1544, or a complement thereof, over a stretch of 8 or more contiguous nucleotides (e.g., 8 or more contiguous nucleotides, 10 or more contiguous nucleotides, 12 or more contiguous nucleotides, 15 or more contiguous nucleotides, or 20 or more contiguous nucleotides). One of the two complementary stretches of nucleotides of the Cas9 single guide RNA (or the DNA encoding the stretch) can be 95% or more identical to one of the sequences set forth in SEQ ID NOs: 431-679, and 1535-1544, or a complement thereof, over a stretch of 8 or more contiguous nucleotides (e.g., 8 or more contiguous nucleotides, 10 or more contiguous nucleotides, 12 or more contiguous nucleotides, 15 or more contiguous nucleotides, or 20 or more contiguous nucleotides). One of the two complementary stretches of nucleotides of the Cas9 single guide RNA (or the DNA encoding the stretch) can be 98% or more identical to one of the sequences set forth in SEQ ID NOs: 431-679, and 1535-1544, or a complement thereof, over a stretch of 8 or more contiguous nucleotides (e.g., 8 or more contiguous nucleotides, 10 or more contiguous nucleotides, 12 or more contiguous nucleotides, 15 or more contiguous nucleotides, or 20 or more contiguous nucleotides). One of the two complementary stretches of nucleotides of the Cas9 single guide RNA (or the DNA encoding the stretch) can be 99% or more identical to one of the sequences set forth in SEQ ID NOs: 431-679, and 1535-1544, or a complement thereof, over a stretch of 8 or more contiguous nucleotides (e.g., 8 or more contiguous nucleotides, 10 or more contiguous nucleotides, 12 or more contiguous nucleotides, 15 or more contiguous nucleotides, or 20 or more contiguous nucleotides). One of the two complementary stretches of nucleotides of the Cas9 single guide RNA (or the DNA encoding the stretch) can be 100% identical to one of the sequences set forth in SEQ ID NOs: 431-679, and 1535-1544, or a complement thereof, over a stretch of 8 or more contiguous nucleotides (e.g., 8 or more contiguous nucleotides, 10 or more contiguous nucleotides, 12 or more contiguous nucleotides, 15 or more contiguous nucleotides, or 20 or more contiguous nucleotides).

[0432] Appropriate cognate pairs of targeters and activators can be routinely determined for SEQ ID NOs:431-679 and 1535-1544, by taking into account the species name and base-pairing (for the dsRNA duplex of the protein-binding domain). Any activator/targeter pair can be used as part of subject Cas9 dual guide RNA or as part of a subject Cas9 single guide RNA.

[0433] In some cases, an activator (e.g., a trRNA, trRNA-like molecule, etc.) of a Cas9 dual guide RNA (e.g., a dual guide RNA) or a Cas9 single guide RNA (e.g., a single guide RNA) includes a stretch of nucleotides with 60% or more sequence identity (e.g., 65% or more, 70% or more, 75% or more, 80% or more, 85% or more, 90% or more, 95% or more, 98% or more, or 100% sequence identity) with a naturally existing activator (tracrRNA) molecule. In some cases, an activator (e.g., a trRNA, trRNA-like molecule, etc.) of a Cas9 dual guide RNA (e.g., a dual guide RNA) or a Cas9 single guide RNA (e.g., a single guide RNA) includes a stretch of nucleotides with 60% or more sequence identity (e.g., 65% or more, 70% or more, 75% or more, 80% or more, 85% or more, 90% or more, 95% or more, 98% or more, or 100% sequence identity) with an activator (tracrRNA) molecule set forth in any one of SEQ ID NOs:431-562, and 1535-1544, or a complement thereof. In some cases, an activator (e.g., a trRNA, trRNA-like molecule, etc.) of a Cas9 dual guide RNA (e.g., a dual guide RNA) or a Cas9 single guide RNA (e.g., a single guide RNA) includes a stretch of nucleotides with 70% or more sequence identity with an activator (tracrRNA) molecule set forth in any one of SEQ ID NOs:431-562, and 1535-1544, or a complement thereof. In some cases, an activator (e.g., a trRNA, trRNA-like molecule, etc.) of a Cas9 dual guide RNA (e.g., a dual guide RNA) or a Cas9 single guide RNA (e.g., a single guide RNA) includes a stretch of nucleotides with 75% or more sequence identity with an activator (tracrRNA) molecule set forth in any one of SEQ ID NOs:431-562, and 1535-1544, or a complement thereof. In some cases, an activator (e.g., a trRNA, trRNA-like molecule, etc.) of a Cas9 dual guide RNA (e.g., a dual guide RNA) or a Cas9 single guide RNA (e.g., a single guide RNA) includes a stretch of nucleotides with 80% or more sequence identity with an activator (tracrRNA) molecule set forth in any one of SEQ ID NOs:431-562, and 1535-1544, or a complement thereof. In some cases, an activator (e.g., a trRNA, trRNA-like molecule, etc.) of a Cas9 dual guide RNA (e.g., a dual guide RNA) or a Cas9 single guide RNA (e.g., a single guide RNA) includes a stretch of nucleotides with 85% or more sequence identity with an activator (tracrRNA) molecule set forth in any one of SEQ ID NOs:431-562, and 1535-1544, or a complement thereof. In some cases, an activator (e.g., a trRNA, trRNA-like molecule, etc.) of a Cas9 dual guide RNA (e.g., a dual guide RNA) or a Cas9 single guide RNA (e.g., a single guide RNA) includes a stretch of nucleotides with 90% or more sequence identity with an activator (tracrRNA) molecule set forth in any one of SEQ ID NOs:431-562, and 1535-1544, or a complement thereof. In some cases, an activator (e.g., a trRNA, trRNA-like molecule, etc.) of a Cas9 dual guide RNA (e.g., a dual guide RNA) or a Cas9 single guide RNA (e.g., a single guide RNA) includes a stretch of nucleotides with 95% or more sequence identity with an activator (tracrRNA) molecule set forth in any one of SEQ ID NOs:431-562, and 1535-1544, or a complement thereof. In some cases, an activator (e.g., a trRNA, trRNA-like molecule, etc.) of a Cas9 dual guide RNA (e.g., a dual guide RNA) or a Cas9 single guide RNA (e.g., a single guide RNA) includes a stretch of nucleotides with 98% or more sequence identity with an activator (tracrRNA) molecule set forth in any one of SEQ ID NOs:431-562, and 1535-1544, or a complement thereof. In some cases, an activator (e.g., a trRNA, trRNA-like molecule, etc.) of a Cas9 dual guide RNA (e.g., a dual guide RNA) or a Cas9 single guide RNA (e.g., a single guide RNA) includes a stretch of nucleotides with 100% sequence identity with an activator (tracrRNA) molecule set forth in any one of SEQ ID NOs:431-562, and 1535-1544, or a complement thereof.

[0434] In some cases, an activator (e.g., a trRNA, trRNA-like molecule, etc.) of a Cas9 dual guide RNA (e.g., a dual guide RNA) or a Cas9 single guide RNA (e.g., a single guide RNA) includes a stretch of nucleotides with 60% or more sequence identity (e.g., 65% or more, 70% or more, 75% or more, 80% or more, 85% or more, 90% or more, 95% or more, 98% or more, or 100% sequence identity) with a nucleotide sequence set forth in any one of SEQ ID NOs:431-679, and 1535-1544, or a complement thereof. In some cases, an activator (e.g., a trRNA, trRNA-like molecule, etc.) of a Cas9 dual guide RNA (e.g., a dual guide RNA) or a Cas9 single guide RNA (e.g., a single guide RNA) includes a stretch of nucleotides with 70% or more sequence identity with an activator (tracrRNA) molecule set forth in any one of SEQ ID NOs:431-562, and 1535-1544, or a complement thereof. In some cases, an activator (e.g., a trRNA, trRNA-like molecule, etc.) of a Cas9 dual guide RNA (e.g., a dual guide RNA) or a Cas9 single guide RNA (e.g., a single guide RNA) includes a stretch of nucleotides with 75% or more sequence identity with an activator (tracrRNA) molecule set forth in any one of SEQ ID NOs:431-562, and 1535-1544, or a complement thereof. In some cases, an activator (e.g., a trRNA, trRNA-like molecule, etc.) of a Cas9 dual guide RNA (e.g., a dual guide RNA) or a Cas9 single guide RNA (e.g., a single guide RNA) includes a stretch of nucleotides with 80% or more sequence identity with an activator (tracrRNA) molecule set forth in any one of SEQ ID NOs:431-562, and 1535-1544, or a complement thereof. In some cases, an activator (e.g., a trRNA, trRNA-like molecule, etc.) of a Cas9 dual guide RNA (e.g., a dual guide RNA) or a Cas9 single guide RNA (e.g., a single guide RNA) includes a stretch of nucleotides with 85% or more sequence identity with an activator (tracrRNA) molecule set forth in any one of SEQ ID NOs:431-562, and 1535-1544, or a complement thereof. In some cases, an activator (e.g., a trRNA, trRNA-like molecule, etc.) of a Cas9 dual guide RNA (e.g., a dual guide RNA) or a Cas9 single guide RNA (e.g., a single guide RNA) includes a stretch of nucleotides with 90% or more sequence identity with an activator (tracrRNA) molecule set forth in any one of SEQ ID NOs:431-562, and 1535-1544, or a complement thereof. In some cases, an activator (e.g., a trRNA, trRNA-like molecule, etc.) of a Cas9 dual guide RNA (e.g., a dual guide RNA) or a Cas9 single guide RNA (e.g., a single guide RNA) includes a stretch of nucleotides with 95% or more sequence identity with an activator (tracrRNA) molecule set forth in any one of SEQ ID NOs:431-562, and 1535-1544, or a complement thereof. In some cases, an activator (e.g., a trRNA, trRNA-like molecule, etc.) of a Cas9 dual guide RNA (e.g., a dual guide RNA) or a Cas9 single guide RNA (e.g., a single guide RNA) includes a stretch of nucleotides with 98% or more sequence identity with an activator (tracrRNA) molecule set forth in any one of SEQ ID NOs:431-562, and 1535-1544, or a complement thereof. In some cases, an activator (e.g., a trRNA, trRNA-like molecule, etc.) of a Cas9 dual guide RNA (e.g., a dual guide RNA) or a Cas9 single guide RNA (e.g., a single guide RNA) includes a stretch of nucleotides with 100% sequence identity with an activator (tracrRNA) molecule set forth in any one of SEQ ID NOs:431-562, and 1535-1544, or a complement thereof.

[0435] In some cases, an activator (e.g., a trRNA, trRNA-like molecule, etc.) of a Cas9 dual guide RNA (e.g., a dual guide RNA) or a Cas9 single guide RNA (e.g., a single guide RNA) includes 30 or more nucleotides (nt) (e.g., 40 or more, 50 or more, 60 or more, 70 or more, 75 or more nt). In some cases, an activator (e.g., a trRNA, trRNA-like molecule, etc.) of a Cas9 dual guide RNA (e.g., a dual guide RNA) or a Cas9 single guide RNA (e.g., a single guide RNA) has a length in a range of from 25 to 300 nucleotides (nt) (e.g., 30 to 300 nt, 40 to 300 nt, 50 to 300 nt, 60 to 300 nt, 65 to 300 nt, 70 to 300 nt, 75 to 300 nt, 30 to 200 nt, 40 to 200 nt, 50 to 200 nt, 60 to 200 nt, 65 to 200 nt, 70 to 200 nt, 75 to 200 nt, 30 to 150 nt, 40 to 150 nt, 50 to 150 nt, 60 to 150 nt, 65 to 150 nt, 70 to 150 nt, 75 to 150 nt, 30 to 100 nt, 40 to 100 nt, 50 to 100 nt, 60 to 100 nt, 65 to 100 nt, 70 to 100 nt, 75 to 100 nt, 30 to 75 nt, 30 to 65 nt, 30 to 50 nt, or 30 to 40 nt). In some cases, an activator (e.g., a trRNA, trRNA-like molecule, etc.) of a dual Cas9 guide RNA (e.g., a dual guide RNA) or a single Cas9 guide RNA (e.g., a single guide RNA) has a length in a range of from 30 to 200 nucleotides (nt) (e.g., 40 to 200 nucleotides, 50 to 200 nucleotides, 60 to 200 nucleotides, 65 to 200 nucleotides, 70 to 200 nucleotides, 75 to 200 nucleotides, 40 to 150 nucleotides, 50 to 150 nucleotides, 60 to 150 nucleotides, 65 to 150 nucleotides, 70 to 150 nucleotides, 75 to 150 nucleotides, 40 to 100 nucleotides, 50 to 100 nucleotides, 60 to 100 nucleotides, 65 to 100 nucleotides, 70 to 100 nucleotides, or 75 to 100 nucleotides).

[0436] In some cases, the protein-binding segment has a length of from 10 nucleotides to 300 nucleotides. Also with regard to both a subject Cas9 single guide RNA and to a subject Cas9 dual guide RNA, the dsRNA duplex of the protein-binding segment can have a length from about 6 base pairs (bp) to about 50 bp. For example, the dsRNA duplex of the protein-binding segment can have a length from about 6 bp to about 40 bp, from about 6 bp to about 30 bp, from about 6 bp to about 25 bp, from about 6 bp to about 20 bp, from about 6 bp to about 15 bp, from about 8 bp to about 40 bp, from about 8 bp to about 30 bp, from about 8 bp to about 25 bp, from about 8 bp to about 20 bp or from about 8 bp to about 15 bp. For example, the dsRNA duplex of the protein-binding segment can have a length from about from about 8 bp to about 10 bp, from about 10 bp to about 15 bp, from about 15 bp to about 18 bp, from about 18 bp to about 20 bp, from about 20 bp to about 25 bp, from about 25 bp to about 30 bp, from about 30 bp to about 35 bp, from about 35 bp to about 40 bp, or from about 40 bp to about 50 bp. In some embodiments, the dsRNA duplex of the protein-binding segment has a length of 36 base pairs. The percent complementarity between the nucleotide sequences that hybridize to form the dsRNA duplex of the protein-binding segment can be 60% or more. For example, the percent complementarity between the nucleotide sequences that hybridize to form the dsRNA duplex of the protein-binding segment can be 65% or more, 70% or more, 75% or more, 80% or more, 85% or more, 90% or more, 95% or more, 98% or more, or 99% or more. In some cases, the dsRNA duplex of the protein binding segment includes a “bulge”, e.g., a region of non-complementarity (which, e.g., can result in two (or more) sub-regions of complementarity separated by one region (or more) of non-complementarity). In some cases, the percent complementarity between the nucleotide sequences that hybridize to form the dsRNA duplex of the protein-binding segment is 100%.

[0437] In some embodiments, a suitable Cas9 guide RNA comprises two separate molecules (an activator and a targeter). In some cases, the first of the two separate molecules (the activator) comprises a nucleotide sequence having 60% or more (e.g., 65% or more, 70% or more, 75% or more, 80% or more, 85% or more, 90% or more, 95% or more, 98% or more, 99% or more, or 100%) nucleotide sequence identity over a stretch of 8 or more contiguous nucleotides (e.g., 8 or more contiguous nucleotides, 10 or more contiguous nucleotides, 12 or more contiguous nucleotides, 15 or more contiguous nucleotides, or 20 or more contiguous nucleotides) to any one of the nucleotide sequences set forth in SEQ ID NOs:431-562, and 1535-1544, or a complement thereof. In some cases, the second of the two separate molecules (the targeter) comprises a nucleotide sequence having 60% or more (e.g., 65% or more, 70% or more, 75% or more, 80% or more, 85% or more, 90% or more, 95% or more, 98% or more, 99% or more, or 100%) nucleotide sequence identity over a stretch of 8 or more contiguous nucleotides (e.g., 8 or more contiguous nucleotides, 10 or more contiguous nucleotides, 12 or more contiguous nucleotides, 15 or more contiguous nucleotides, or 20 or more contiguous nucleotides) to any one of the nucleotide sequences set forth in SEQ ID NOs:563-679, or a complement thereof.

[0438] In some embodiments, a suitable Cas9 guide RNA is a single RNA polynucleotide and comprises a first nucleotide sequence having 60% or more (e.g., 65% or more, 70% or more, 75% or more, 80% or more, 85% or more, 90% or more, 95% or more, 98% or more, 99% or more, or 100%) nucleotide sequence identity over a stretch of 8 or more contiguous nucleotides (e.g., 8 or more contiguous nucleotides, 10 or more contiguous nucleotides, 12 or more contiguous nucleotides, 15 or more contiguous nucleotides, or 20 or more contiguous nucleotides) to any one of the nucleotide sequences set forth in SEQ ID NOs:431-562, and 1535-1544, and a second nucleotide sequence having 60% or more (e.g., 65% or more, 70% or more, 75% or more, 80% or more, 85% or more, 90% or more, 95% or more, 98% or more, 99% or more, or 100%) nucleotide sequence identity over a stretch of 8 or more contiguous nucleotides (e.g., 8 or more contiguous nucleotides, 10 or more contiguous nucleotides, 12 or more contiguous nucleotides, 15 or more contiguous nucleotides, or 20 or more contiguous nucleotides) to any one of the nucleotide sequences set forth in SEQ ID NOs: 463-679.

[0439] In some embodiments, the targeter comprises the sequence 5′GUUUUAGAGCUA-3′ (SEQ ID NO:679) linked at its 5′ end to a stretch of nucleotides that are complementary to a target nucleic acid. In some embodiments, the activator comprises the sequence

(SEQ ID NO: 397)
5′-UAGCAAGUUAAAAUAAGGCUAGUCCG-3′.

[0440] In some embodiments, a Cas9 guide RNA comprises the sequence 5′-GUUUUAGAGCUA-linker-UAGCAAGUUAAAAUAAGGCUAGUCCG-3′ (SEQ ID NO:680) linked at its 5′ end to a stretch of nucleotides that are complementary to a target nucleic acid (where “linker” denotes any a linker nucleotide sequence that can comprise any nucleotide sequence). Illustrative examples of Cas9 single guide RNAs include those set forth in SEQ ID NOs: 680-682.

[0441] A subject dual guide RNA comprises two separate nucleic acid molecules. Each of the two molecules of a subject dual guide RNA comprises a stretch of nucleotides that are complementary to one another such that the complementary nucleotides of the two molecules hybridize to form the double stranded RNA duplex of the protein-binding segment.

[0442] In some embodiments, the duplex-forming segment of the activator is 60% or more identical to one of the activator (tracrRNA) molecules set forth in SEQ ID NOs:431-562, or a complement thereof, over a stretch of 8 or more contiguous nucleotides (e.g., 8 or more contiguous nucleotides, 10 or more contiguous nucleotides, 12 or more contiguous nucleotides, 15 or more contiguous nucleotides, or 20 or more contiguous nucleotides). For example, the duplex-forming segment of the activator (or the DNA encoding the duplex-forming segment of the activator) can be 65% or more identical to one of the tracrRNA sequences set forth in SEQ ID NOs:431-562, or a complement thereof, over a stretch of 8 or more contiguous nucleotides (e.g., 8 or more contiguous nucleotides, 10 or more contiguous nucleotides, 12 or more contiguous nucleotides, 15 or more contiguous nucleotides, or 20 or more contiguous nucleotides).

[0443] The duplex-forming segment of the activator (or the DNA encoding the duplex-forming segment of the activator) can be 70% or more identical to one of the tracrRNA sequences set forth in SEQ ID NOs:431-562, or a complement thereof, over a stretch of 8 or more contiguous nucleotides (e.g., 8 or more contiguous nucleotides, 10 or more contiguous nucleotides, 12 or more contiguous nucleotides, 15 or more contiguous nucleotides, or 20 or more contiguous nucleotides).

[0444] The duplex-forming segment of the activator (or the DNA encoding the duplex-forming segment of the activator) can be 75% or more identical to one of the tracrRNA sequences set forth in SEQ ID NOs:431-562, or a complement thereof, over a stretch of 8 or more contiguous nucleotides (e.g., 8 or more contiguous nucleotides, 10 or more contiguous nucleotides, 12 or more contiguous nucleotides, 15 or more contiguous nucleotides, or 20 or more contiguous nucleotides).

[0445] The duplex-forming segment of the activator (or the DNA encoding the duplex-forming segment of the activator) can be 80% or more identical to one of the tracrRNA sequences set forth in SEQ ID NOs:431-562, or a complement thereof, over a stretch of 8 or more contiguous nucleotides (e.g., 8 or more contiguous nucleotides, 10 or more contiguous nucleotides, 12 or more contiguous nucleotides, 15 or more contiguous nucleotides, or 20 or more contiguous nucleotides).

[0446] The duplex-forming segment of the activator (or the DNA encoding the duplex-forming segment of the activator) can be 85% or more identical to one of the tracrRNA sequences set forth in SEQ ID NOs:431-562, or a complement thereof, over a stretch of 8 or more contiguous nucleotides (e.g., 8 or more contiguous nucleotides, 10 or more contiguous nucleotides, 12 or more contiguous nucleotides, 15 or more contiguous nucleotides, or 20 or more contiguous nucleotides).

[0447] The duplex-forming segment of the activator (or the DNA encoding the duplex-forming segment of the activator) can be 90% or more identical to one of the tracrRNA sequences set forth in SEQ ID NOs:431-562, or a complement thereof, over a stretch of 8 or more contiguous nucleotides (e.g., 8 or more contiguous nucleotides, 10 or more contiguous nucleotides, 12 or more contiguous nucleotides, 15 or more contiguous nucleotides, or 20 or more contiguous nucleotides).

[0448] The duplex-forming segment of the activator (or the DNA encoding the duplex-forming segment of the activator) can be 95% or more identical to one of the tracrRNA sequences set forth in SEQ ID NOs:431-562, or a complement thereof, over a stretch of 8 or more contiguous nucleotides (e.g., 8 or more contiguous nucleotides, 10 or more contiguous nucleotides, 12 or more contiguous nucleotides, 15 or more contiguous nucleotides, or 20 or more contiguous nucleotides).

[0449] The duplex-forming segment of the activator (or the DNA encoding the duplex-forming segment of the activator) can be 98% or more identical to one of the tracrRNA sequences set forth in SEQ ID NOs:431-562, or a complement thereof, over a stretch of 8 or more contiguous nucleotides (e.g., 8 or more contiguous nucleotides, 10 or more contiguous nucleotides, 12 or more contiguous nucleotides, 15 or more contiguous nucleotides, or 20 or more contiguous nucleotides).

[0450] The duplex-forming segment of the activator (or the DNA encoding the duplex-forming segment of the activator) can be 99% or more identical to one of the tracrRNA sequences set forth in SEQ ID NOs:431-562, or a complement thereof, over a stretch of 8 or more contiguous nucleotides (e.g., 8 or more contiguous nucleotides, 10 or more contiguous nucleotides, 12 or more contiguous nucleotides, 15 or more contiguous nucleotides, or 20 or more contiguous nucleotides).

[0451] The duplex-forming segment of the activator (or the DNA encoding the duplex-forming segment of the activator) can be 100% identical to one of the tracrRNA sequences set forth in SEQ ID NOs:431-562, or a complement thereof, over a stretch of 8 or more contiguous nucleotides (e.g., 8 or more contiguous nucleotides, 10 or more contiguous nucleotides, 12 or more contiguous nucleotides, 15 or more contiguous nucleotides, or 20 or more contiguous nucleotides).

[0452] In some embodiments, the duplex-forming segment of the targeter is 60% or more identical to one of the targeter (crRNA) seqeunces set forth in SEQ ID NOs:563-679, or a complement thereof, over a stretch of 8 or more contiguous nucleotides (e.g., 8 or more contiguous nucleotides, 10 or more contiguous nucleotides, 12 or more contiguous nucleotides, 15 contig or more contiguous uous nucleotides, or 20 or more contiguous nucleotides). For example, the duplex-forming segment of the targeter (or the DNA encoding the duplex-forming segment of the targeter) can be 65% or more identical to one of the crRNA sequences set forth in SEQ ID NOs:563-679, or a complement thereof, over a stretch of 8 or more contiguous nucleotides (e.g., 8 or more contiguous nucleotides, 10 or more contiguous nucleotides, 12 or more contiguous nucleotides, 15 or more contiguous nucleotides, or 20 or more contiguous nucleotides).

[0453] The duplex-forming segment of the targeter (or the DNA encoding the duplex-forming segment of the targeter) can be 70% or more identical to one of the crRNA sequences set forth in SEQ ID NOs:563-679, or a complement thereof, over a stretch of 8 or more contiguous nucleotides (e.g., 8 or more contiguous nucleotides, 10 or more contiguous nucleotides, 12 or more contiguous nucleotides, 15 or more contiguous nucleotides, or 20 or more contiguous nucleotides).

[0454] The duplex-forming segment of the targeter (or the DNA encoding the duplex-forming segment of the targeter) can be 75% or more identical to one of the crRNA sequences set forth in SEQ ID NOs:563-679, or a complement thereof, over a stretch of 8 or more contiguous nucleotides (e.g., 8 or more contiguous nucleotides, 10 or more contiguous nucleotides, 12 or more contiguous nucleotides, 15 or more contiguous nucleotides, or 20 or more contiguous nucleotides).

[0455] The duplex-forming segment of the targeter (or the DNA encoding the duplex-forming segment of the targeter) can be 80% or more identical to one of the crRNA sequences set forth in SEQ ID NOs:563-679, or a complement thereof, over a stretch of 8 or more contiguous nucleotides (e.g., 8 or more contiguous nucleotides, 10 or more contiguous nucleotides, 12 or more contiguous nucleotides, 15 or more contiguous nucleotides, or 20 or more contiguous nucleotides).

[0456] The duplex-forming segment of the targeter (or the DNA encoding the duplex-forming segment of the targeter) can be 85% or more identical to one of the crRNA sequences set forth in SEQ ID NOs:563-679, or a complement thereof, over a stretch of 8 or more contiguous nucleotides (e.g., 8 or more contiguous nucleotides, 10 or more contiguous nucleotides, 12 or more contiguous nucleotides, 15 or more contiguous nucleotides, or 20 or more contiguous nucleotides).

[0457] The duplex-forming segment of the targeter (or the DNA encoding the duplex-forming segment of the targeter) can be 90% or more identical to one of the crRNA sequences set forth in SEQ ID NOs:563-679, or a complement thereof, over a stretch of 8 or more contiguous nucleotides (e.g., 8 or more contiguous nucleotides, 10 or more contiguous nucleotides, 12 or more contiguous nucleotides, 15 or more contiguous nucleotides, or 20 or more contiguous nucleotides).

[0458] The duplex-forming segment of the targeter (or the DNA encoding the duplex-forming segment of the targeter) can be 95% or more identical to one of the crRNA sequences set forth in SEQ ID NOs:563-679, or a complement thereof, over a stretch of 8 or more contiguous nucleotides (e.g., 8 or more contiguous nucleotides, 10 or more contiguous nucleotides, 12 or more contiguous nucleotides, 15 or more contiguous nucleotides, or 20 or more contiguous nucleotides).

[0459] The duplex-forming segment of the targeter (or the DNA encoding the duplex-forming segment of the targeter) can be 98% or more identical to one of the crRNA sequences set forth in SEQ ID NOs:563-679, or a complement thereof, over a stretch of 8 or more contiguous nucleotides (e.g., 8 or more contiguous nucleotides, 10 or more contiguous nucleotides, 12 or more contiguous nucleotides, 15 or more contiguous nucleotides, or 20 or more contiguous nucleotides).

[0460] The duplex-forming segment of the targeter (or the DNA encoding the duplex-forming segment of the targeter) can be 99% or more identical to one of the crRNA sequences set forth in SEQ ID NOs:563-679, or a complement thereof, over a stretch of 8 or more contiguous nucleotides (e.g., 8 or more contiguous nucleotides, 10 or more contiguous nucleotides, 12 or more contiguous nucleotides, 15 or more contiguous nucleotides, or 20 or more contiguous nucleotides).

[0461] The duplex-forming segment of the targeter (or the DNA encoding the duplex-forming segment of the targeter) can be 100% identical to one of the crRNA sequences set forth in SEQ ID NOs:563-679, or a complement thereof, over a stretch of 8 or more contiguous nucleotides (e.g., 8 or more contiguous nucleotides, 10 or more contiguous nucleotides, 12 or more contiguous nucleotides, 15 or more contiguous nucleotides, or 20 or more contiguous nucleotides).

[0462] A dual guide RNA can be designed to allow for controlled (i.e., conditional) binding of a targeter with an activator. Because a dual Cas9 guide RNA is not functional unless both the activator and the targeter are bound in a functional complex with Cas9, a dual guide guide RNA can be inducible (e.g., drug inducible) by rendering the binding between the activator and the targeter to be inducible. As one non-limiting example, RNA aptamers can be used to regulate (i.e., control) the binding of the activator with the targeter. Accordingly, the activator and/or the targeter can include an RNA aptamer sequence.

[0463] Aptamers (e.g., RNA aptamers) are known in the art and are generally a synthetic version of a riboswitch. The terms “RNA aptamer” and “riboswitch” are used interchangeably herein to encompass both synthetic and natural nucleic acid sequences that provide for inducible regulation of the structure (and therefore the availability of specific sequences) of the nucleic acid molecule (e.g., RNA, DNA/RNA hybrid, etc.) of which they are part. RNA aptamers usually comprise a sequence that folds into a particular structure (e.g., a hairpin), which specifically binds a particular drug (e.g., a small molecule). Binding of the drug causes a structural change in the folding of the RNA, which changes a feature of the nucleic acid of which the aptamer is a part. As non-limiting examples: (i) an activator with an aptamer may not be able to bind to the cognate targeter unless the aptamer is bound by the appropriate drug; (ii) a targeter with an aptamer may not be able to bind to the cognate activator unless the aptamer is bound by the appropriate drug; and (iii) a targeter and an activator, each comprising a different aptamer that binds a different drug, may not be able to bind to each other unless both drugs are present. As illustrated by these examples, a dual Cas9 guide RNA can be designed to be inducible.

[0464] Examples of aptamers and riboswitches can be found, for example, in: Nakamura et al., Genes Cells. 2012 May; 17(5):344-64; Vavalle et al., Future Cardiol. 2012 May; 8(3):371-82; Citartan et al., Biosens Bioelectron. 2012 Apr. 15; 34(1):1-11; and Liberman et al., Wiley Interdiscip Rev RNA. 2012 May-June; 3(3):369-84; all of which are herein incorporated by reference in their entirety.

[0465] Non-limiting examples of nucleotide sequences that can be included in a dual Cas9 guide RNA include either of the sequences set forth in SEQ ID NOs:431-562, or complements thereof pairing with any sequences set forth in SEQ ID NOs:563-679, or complements thereof that can hybridize to form a protein binding segment.

[0466] Hybrid Cas9 Guide RNAs

[0467] In some cases, a Cas9 guide RNA is two RNA molecules (dual guide RNA). In some cases, a Cas9 guide RNA is one RNA molecule (single guide RNA). In some cases, a Cas9 guide RNA is a DNA/RNA hybrid molecule. In such cases, the protein-binding segment of the Cas9 guide RNA is RNA and forms an RNA duplex. Thus, the duplex-forming segments of the activator and the targeter is RNA. However, the targeting segment of a Cas9 guide RNA can be DNA. Thus, if a DNA/RNA hybrid Cas9 guide RNA is a dual Cas9 guide RNA, the “targeter” molecule and be a hybrid molecule (e.g, the targeting segment can be DNA and the duplex-forming segment can be RNA). In such cases, the duplex-forming segment of the “activator” molecule can be RNA (e.g., in order to form an RNA-duplex with the duplex-forming segment of the targeter molecule), while nucleotides of the “activator” molecule that are outside of the duplex-forming segment can be DNA (in which case the activator molecule is a hybrid DNA/RNA molecule) or can be RNA (in which case the activator molecule is RNA). If a DNA/RNA hybrid Cas9 guide RNA is a single Cas9 guide RNA, then the targeting segment can be DNA, the duplex-forming segments (which make up the protein-binding segment of the single Cas9 guide RNA) can be RNA, and nucleotides outside of the targeting and duplex-forming segments can be RNA or DNA.

[0468] A DNA/RNA hybrid guide nucleic can be useful in some cases, for example, when a target nucleic acid is an RNA. Cas9 normally associates with a guide RNA that hybridizes with a target DNA, thus forming a DNA-RNA duplex at the target site. Therefore, when the target nucleic acid is an RNA, it is sometimes advantageous to recapitulate a DNA-RNA duplex at the target site by using a targeting segment (of the Cas9 guide RNA) that is DNA instead of RNA. However, because the protein-binding segment of a Cas9 guide RNA is an RNA-duplex, the targeter molecule is DNA in the targeting segment and RNA in the duplex-forming segment. Hybrid Cas9 guide RNAs can bias Cas9 binding to single stranded target nucleic acids relative to double stranded target nucleic acids.

[0469] Example Cas9 Guide RNAs

[0470] In some embodiments, a suitable Cas9 guide RNA comprises two separate RNA polynucleotide molecules. In some cases, the first of the two separate RNA polynucleotide molecules (the activator) comprises a nucleotide sequence having 60% or more (e.g., 65% or more, 70% or more, 75% or more, 80% or more, 85% or more, 90% or more, 95% or more, 98% or more, 99% or more, or 100%) nucleotide sequence identity over a stretch of 8 or more contiguous nucleotides (e.g., 8 or more contiguous nucleotides, 10 or more contiguous nucleotides, 12 or more contiguous nucleotides, 15 or more contiguous nucleotides, or 20 or more contiguous nucleotides) to any one of the nucleotide sequences set forth in SEQ ID NOs:431-562, or a complement thereof. In some cases, the second of the two separate RNA polynucleotide molecules (the targeter) comprises a nucleotide sequence having 60% or more (e.g., 65% or more, 70% or more, 75% or more, 80% or more, 85% or more, 90% or more, 95% or more, 98% or more, 99% or more, or 100%) nucleotide sequence identity over a stretch of 8 or more contiguous nucleotides (e.g., 8 or more contiguous nucleotides, 10 or more contiguous nucleotides, 12 or more contiguous nucleotides, 15 or more contiguous nucleotides, or 20 or more contiguous nucleotides) to any one of the nucleotide sequences set forth in SEQ ID NOs:563-679, or a complement thereof.

[0471] In some embodiments, a suitable Cas9 guide RNA is a single RNA polynucleotide and comprises a first nucleotide sequence having 60% or more (e.g., 65% or more, 70% or more, 75% or more, 80% or more, 85% or more, 90% or more, 95% or more, 98% or more, 99% or more, or 100%) nucleotide sequence identity over a stretch of 8 or more contiguous nucleotides (e.g., 8 or more contiguous nucleotides, 10 or more contiguous nucleotides, 12 or more contiguous nucleotides, 15 or more contiguous nucleotides, or 20 or more contiguous nucleotides) to any one of the nucleotide sequences set forth in SEQ ID NOs:431-562 and a second nucleotide sequence having 60% or more (e.g., 65% or more, 70% or more, 75% or more, 80% or more, 85% or more, 90% or more, 95% or more, 98% or more, 99% or more, or 100%) nucleotide sequence identity over a stretch of 8 or more contiguous nucleotides (e.g., 8 or more contiguous nucleotides, 10 or more contiguous nucleotides, 12 or more contiguous nucleotides, 15 or more contiguous nucleotides, or 20 or more contiguous nucleotides) to any one of the nucleotide sequences set forth in SEQ ID NOs: 463-679.

[0472] In some embodiments, the Cas9 guide RNA is a dual Cas9 guide RNA and the targeter comprises the sequence 5′GUUUUAGAGCUA-3′ (SEQ ID NO:679) linked at its 5′ end to a stretch of nucleotides that are complementary to a target nucleic acid. In some embodiments, the Cas9 guide RNA is a dual Cas9 guide RNA and the activator comprises the sequence 5′ UAGCAAGUUAAAAUAAGGCUAGUCCG-3′ (SEQ ID NO:397).

[0473] In some embodiments, the Cas9 guide RNA is a single Cas9 guide RNA and comprises the sequence 5′-GUUUUAGAGCUA-linker-UAGCAAGUUAAAAUAAGGCUAGUCCG-3′ (SEQ ID NO:680) linked at its 5′ end to a stretch of nucleotides that are complementary to a target nucleic acid (where “linker” denotes any a linker nucleotide sequence that can comprise any nucleotide sequence). Other exemplary single Cas9 guide RNAs include those set forth in SEQ ID NOs: 680-682.

[0474] Stability Control Sequence (e.g., Transcriptional Terminator Segment)

[0475] In some embodiments, a Cas9 guide RNA comprises a stability control sequence. A stability control sequence influences the stability of a nucleic acid (e.g., a Cas9 guide RNA, a targeter, an activator, etc.). One example of a suitable stability control sequence for use with an RNA is a transcriptional terminator segment (i.e., a transcription termination sequence). A transcriptional terminator segment of a subject Cas9 guide RNA can have a total length of from about 10 nucleotides to about 100 nucleotides, e.g., from about 10 nucleotides (nt) to about 20 nt, from about 20 nt to about 30 nt, from about 30 nt to about 40 nt, from about 40 nt to about 50 nt, from about 50 nt to about 60 nt, from about 60 nt to about 70 nt, from about 70 nt to about 80 nt, from about 80 nt to about 90 nt, or from about 90 nt to about 100 nt. For example, the transcriptional terminator segment can have a length of from about 15 nucleotides (nt) to about 80 nt, from about 15 nt to about 50 nt, from about 15 nt to about 40 nt, from about 15 nt to about 30 nt or from about 15 nt to about 25 nt.

[0476] In some cases, the transcription termination sequence is one that is functional in a eukaryotic cell. In some cases, the transcription termination sequence is one that is functional in a prokaryotic cell.

[0477] Non-limiting examples of nucleotide sequences that can be included in a stability control sequence (e.g., transcriptional termination segment, or in any segment of the Cas9 guide RNA to provide for increased stability) include sequences set forth in SEQ ID NO:683-696 and, for example,

(SEQ ID NO: 1349)
5′-UAAUCCCACAGCCGCCAGUUCCGCUGGCGGCAUUUU-5′ (a Rho-
independent trp termination site).

[0478] Additional Sequences

[0479] In some embodiments, a Cas9 guide RNA comprises an additional segment or segments (in some cases at the 5′ end, in some cases the 3′ end, in some cases at either the 5′ or 3′ end, in some cases embedded within the sequence (i.e., not at the 5′ and/or 3′ end), in some cases at both the 5′ end and the 3′ end, in some cases embedded and at the 5′ end and/or the 3′ end, etc). For example, a suitable additional segment can comprise a 5′ cap (e.g., a 7-methylguanylate cap (m⁷G)); a 3′ polyadenylated tail (i.e., a 3′ poly(A) tail); a ribozyme sequence (e.g. to allow for self-cleavage of a Cas9 guide RNA (or component of a Cas9 guide RNA, e.g., a targeter, an activator, etc.) and release of a mature PAMmer in a regulated fashion); a riboswitch sequence (e.g., to allow for regulated stability and/or regulated accessibility by proteins and protein complexes); a sequence that forms a dsRNA duplex (i.e., a hairpin)); a sequence that targets an RNA to a subcellular location (e.g., nucleus, mitochondria, chloroplasts, and the like); a modification or sequence that provides for tracking (e.g., a direct label (e.g., direct conjugation to a fluorescent molecule (i.e., fluorescent dye)), conjugation to a moiety that facilitates fluorescent detection, a sequence that allows for fluorescent detection; a modification or sequence that provides a binding site for proteins (e.g., proteins that act on DNA, including transcriptional activators, transcriptional repressors, DNA methyltransferases, DNA demethylases, histone acetyltransferases, histone deacetylases, proteins that bind RNA (e.g., RNA aptemers), labeled proteins, fluorescently labeled proteins, and the like); a modification or sequence that provides for increased, decreased, and/or controllable stability; and combinations thereof.

[0480] Examples of various Cas9 guide RNAs can be found in the art, for example, see Jinek et al., Science. 2012 Aug. 17; 337(6096):816-21; Chylinski et al., RNA Biol. 2013 May; 10(5):726-37; Ma et al., Biomed Res Int. 2013; 2013:270805; Hou et al., Proc Natl Acad Sci USA. 2013 Sep. 24; 110(39):15644-9; Jinek et al., Elife. 2013;2:e00471; Pattanayak et al., Nat Biotechnol. 2013 September; 31(9):839-43; Qi et al, Cell. 2013 Feb. 28; 152(5):1173-83; Wang et al., Cell. 2013 May 9; 153(4):910-8; Auer et. al., Genome Res. 2013 Oct. 31; Chen et. al., Nucleic Acids Res. 2013 Nov. 1; 41(20):e19; Cheng et. al., Cell Res. 2013 Oct;23(10):1163-71; Cho et. al., Genetics. 2013 November; 195(3):1177-80; DiCarlo et al., Nucleic Acids Res. 2013 April; 41(7):4336-43; Dickinson et. al., Nat Methods. 2013 October; 10(10):1028-34; Ebina et. al., Sci Rep. 2013; 3:2510; Fujii et. al, Nucleic Acids Res. 2013 Nov. 1; 41(20):e187; Hu et. al., Cell Res. 2013 November; 23(11):1322-5; Jiang et. al., Nucleic Acids Res. 2013 Nov. 1; 41(20):e188; Larson et. al., Nat Protoc. 2013 November; 8(11):2180-96; Mali et. at., Nat Methods. 2013 October; 10(10):957-63; Nakayama et. al., Genesis. 2013 December; 51(12):835-43; Ran et. al., Nat Protoc. 2013 November; 8(11):2281-308; Ran et. al., Cell. 2013 Sep. 12; 154(6):1380-9; Upadhyay et. al., G3 (Bethesda). 2013 Dec. 9; 3(12):2233-8; Walsh et. al., Proc Natl Acad Sci USA. 2013 Sep. 24; 110(39):15514-5; Xie et. al., Mol Plant. 2013 Oct. 9; Yang et. al., Cell. 2013 Sep. 12; 154(6):1370-9; Briner et al., Mol Cell. 2014 Oct. 23; 56(2):333-9; and U.S. patents and patent applications: U.S. Pat. Nos. 8,906,616; 8,895,308; 8,889,418; 8,889,356; 8,871,445; 8,865,406; 8,795,965; 8,771,945; 8,697,359; 20140068797; 20140170753; 20140179006; 20140179770; 20140186843; 20140186919; 20140186958; 20140189896; 20140227787; 20140234972; 20140242664; 20140242699; 20140242700; 20140242702; 20140248702; 20140256046; 20140273037; 20140273226; 20140273230; 20140273231; 20140273232; 20140273233; 20140273234; 20140273235; 20140287938; 20140295556; 20140295557; 20140298547; 20140304853; 20140309487; 20140310828; 20140310830; 20140315985; 20140335063; 20140335620; 20140342456; 20140342457; 20140342458; 20140349400; 20140349405; 20140356867; 20140356956; 20140356958; 20140356959; 20140357523; 20140357530; 20140364333; and 20140377868; all of which are hereby incorporated by reference in their entirety.

[0481] Donor Polynucleotide

[0482] In some cases, the contacting occurs under conditions that are permissive for nonhomologous end joining or homology-directed repair. In some cases, the method further comprises contacting the target DNA with a donor polynucleotide, wherein the donor polynucleotide, a portion of the donor polynucleotide, a copy of the donor polynucleotide, or a portion of a copy of the donor polynucleotide integrates into the target DNA. In some cases, the method does not comprise contacting a cell with a donor polynucleotide, and the target DNA is modified such that nucleotides within the target DNA are deleted.

[0483] In some cases, Cas9 guide RNA and a Cas9 heterodimer are coadministered (e.g., contacted with a target nucleic acid, administered to cells, etc.) with a donor polynucleotide sequence that includes at least a segment with homology to the target DNA sequence, the subject methods may be used to add, i.e. insert or replace, nucleic acid material to a target DNA sequence (e.g. to “knock in” a nucleic acid that encodes for a protein, an siRNA, an miRNA, etc.), to add a tag (e.g., 6× His, a fluorescent protein (e.g., a green fluorescent protein; a yellow fluorescent protein, etc.), hemagglutinin (HA), FLAG, etc.), to add a regulatory sequence to a gene (e.g. promoter, polyadenylation signal, internal ribosome entry sequence (IRES), 2A peptide, start codon, stop codon, splice signal, localization signal, etc.), to modify a nucleic acid sequence (e.g., introduce a mutation), and the like. As such, a complex comprising a Cas9 guide RNA and a Cas9 heterodimer is useful in any in vitro or in vivo application in which it is desirable to modify DNA in a site-specific, i.e. “targeted”, way, for example gene knock-out, gene knock-in, gene editing, gene tagging, etc., as used in, for example, gene therapy, e.g. to treat a disease or as an antiviral, antipathogenic, or anticancer therapeutic, the production of genetically modified organisms in agriculture, the large scale production of proteins by cells for therapeutic, diagnostic, or research purposes, the induction of iPS cells, biological research, the targeting of genes of pathogens for deletion or replacement, etc

[0484] In applications in which it is desirable to insert a polynucleotide sequence into a target DNA sequence, a polynucleotide comprising a donor sequence to be inserted is also provided to the cell. By a “donor sequence” or “donor polynucleotide” it is meant a nucleic acid sequence to be inserted at the cleavage site induced by a Cas9 heterodimer. The donor polynucleotide will contain sufficient homology to a genomic sequence at the cleavage site, e.g. 70%, 80%, 85%, 90%, 95%, or 100% homology with the nucleotide sequences flanking the cleavage site, e.g. within about 50 bases or less of the cleavage site, e.g. within about 30 bases, within about 15 bases, within about 10 bases, within about 5 bases, or immediately flanking the cleavage site, to support homology-directed repair between it and the genomic sequence to which it bears homology. Approximately 25, 50, 100, or 200 nucleotides, or more than 200 nucleotides, of sequence homology between a donor and a genomic sequence (or any integral value between 10 and 200 nucleotides, or more) will support homology-directed repair. Donor sequences can be of any length, e.g. 10 nucleotides or more, 50 nucleotides or more, 100 nucleotides or more, 250 nucleotides or more, 500 nucleotides or more, 1000 nucleotides or more, 5000 nucleotides or more, etc.

[0485] The donor sequence is typically not identical to the genomic sequence that it replaces. Rather, the donor sequence may contain at least one or more single base changes, insertions, deletions, inversions or rearrangements with respect to the genomic sequence, so long as sufficient homology is present to support homology-directed repair. In some embodiments, the donor sequence comprises a non-homologous sequence flanked by two regions of homology, such that homology-directed repair between the target DNA region and the two flanking sequences results in insertion of the non-homologous sequence at the target region. Donor sequences may also comprise a vector backbone containing sequences that are not homologous to the DNA region of interest and that are not intended for insertion into the DNA region of interest. Generally, the homologous region(s) of a donor sequence will have at least 50% sequence identity to a genomic sequence with which recombination is desired. In certain embodiments, 60%, 70%, 80%, 90%, 95%, 98%, 99%, or 99.9% sequence identity is present. Any value between 1% and 100% sequence identity can be present, depending upon the length of the donor polynucleotide.

[0486] The donor sequence may comprise certain sequence differences as compared to the genomic sequence, e.g. restriction sites, nucleotide polymorphisms, selectable markers (e.g., drug resistance genes, fluorescent proteins, enzymes etc.), etc., which may be used to assess for successful insertion of the donor sequence at the cleavage site or in some cases may be used for other purposes (e.g., to signify expression at the targeted genomic locus). In some cases, if located in a coding region, such nucleotide sequence differences will not change the amino acid sequence, or will make silent amino acid changes (i.e., changes which do not affect the structure or function of the protein). Alternatively, these sequences differences may include flanking recombination sequences such as FLPs, loxP sequences, or the like, that can be activated at a later time for removal of the marker sequence.

[0487] The donor sequence may be provided to the cell as single-stranded DNA, single-stranded RNA, double-stranded DNA, or double-stranded RNA. It may be introduced into a cell in linear or circular form. If introduced in linear form, the ends of the donor sequence may be protected (e.g., from exonucleolytic degradation) by methods known to those of skill in the art. For example, one or more dideoxynucleotide residues are added to the 3′ terminus of a linear molecule and/or self-complementary oligonucleotides are ligated to one or both ends. See, for example, Chang et al. (1987) Proc. Natl. Acad Sci USA 84:4959-4963; Nehls et al. (1996) Science 272:886-889. Additional methods for protecting exogenous polynucleotides from degradation include, but are not limited to, addition of terminal amino group(s) and the use of modified internucleotide linkages such as, for example, phosphorothioates, phosphoramidates, and O-methyl ribose or deoxyribose residues. As an alternative to protecting the termini of a linear donor sequence, additional lengths of sequence may be included outside of the regions of homology that can be degraded without impacting recombination. A donor sequence can be introduced into a cell as part of a vector molecule having additional sequences such as, for example, replication origins, promoters and genes encoding antibiotic resistance. Moreover, donor sequences can be introduced as naked nucleic acid, as nucleic acid complexed with an agent such as a liposome or poloxamer, or can be delivered by viruses (e.g., adenovirus, AAV), as described above for nucleic acids encoding a Cas9 guide RNA and/or a Cas9 heterodimer and/or donor polynucleotide.

[0488] PAMmer (and PAM Sequences)

[0489] In some cases, e.g., when a target nucleic acid is single stranded, a PAMmer can be used to provide a PAM sequence. PAMmers can be present in subject compositions, systems, kits, and/or methods.

[0490] A “PAMmer” is a single stranded oligonucleotide (e.g., DNA, RNA, a modified nucleic acid, etc.) that hybridizes to a single stranded target nucleic acid (thus converting the single stranded target nucleic acid into a double stranded target nucleic acid at a desired position), and provides a protospacer adjacent motif (PAM) sequence. For information regarding PAMmers in addition to the discussion below, see, for example, O'Connell et al., Nature. 2014 Dec. 11; 516(7530):263-6; and Sternberg et. al., Nature. 2014 Mar. 6; 507(7490):62-7; both of which are hereby incorporated by reference in their entirety.

[0491] A PAMmer includes a PAM sequence and at least one of: an orientation segment (which is positioned 3′ of the PAM sequence), and a specificity segment (which is positioned 5′ of the PAM sequence). A specificity segment has a nucleotide sequence that is complementary to a first target nucleotide sequence in a target nucleic acid (i.e., the sequence that is targeted by the specificity segment), where the first target nucleotide sequence overlaps (in some cases 100%) with the sequence targeted by the targeting segment of the guide nucleic acid. In other words, the specificity segment is complementary with (and hybridizes to) the target site of the target nucleic acid (see FIGS. 8A-F).

[0492] In some cases, a PAMmer having a specificity segement is referred to herein as a “5′ extended PAMmer.” The term “5′ extended PAMmer” refers to a situation in which a PAMmer includes nucleotides 5′ of the PAM sequence. The term “5′ extended PAMmer” encompasses a PAMmer having a specificity segment, but also encompasses a PAMmer that has nucleotides 5′ of the PAM sequence that do not constitute a specificity segment. Thus, in some cases, the nucleotides that are 5′ of the PAM sequence constitute a specificity segment (i.e., the nucleotides hybridize to the target nucleic acid)(see below for a more detailed discussion regarding a specificity segment), and in some cases, a PAMmer has nucleotides that are 5′ of the PAM sequence that do not constitute a specificity segment (do not hybridize with the target nucleic acid).

[0493] An orientation segment has a nucleotide sequence that is complementary to a second target nucleotide sequence in a target nucleic acid (i.e., the sequence that is targeted by the orientation segment). In some cases, a subject PAMmer includes a PAM sequence and an orientation segment, but does not include a specificity segment. In some cases, a subject PAMmer includes a PAM sequence and a specificity segment, but does not include an orientation segment.

[0494] In some cases, a subject PAMmer includes a PAM sequence, an orientation segment, and a specificity segment. The number of nucleotides (nt) present in the PAMmer between a specificity segment and an orientation segment can depend on a number of factors that include, but are not limited to: the length of the PAM sequence (which is present between the specificity segment and the orientation segment); the number of of nucleotides present between the target site and the orientation site of the target nucleic acid; the presence or absence of additional sequences (e.g., aptamers, protein binding sequences, linker nucleotides, stability sequences, etc.) between the specificity segment and the orientation segment; etc. In some embodiments, the number of nucleotides (nt) present in the PAMmer between a specificity segment and an orientation segment is in a range of from 2 nt to 100 nt (e.g., 2 nt to 90 nt, 2 nt to 80 nt, 2 nt to 70 nt, 2 nt to 60 nt, 2 nt to 50 nt, 2 nt to 40 nt, 2 nt to 30 nt, 2 nt to 25 nt, 2 nt to 20 nt, 2 nt to 15 nt, or 2 nt to 10 nt). In some embodiments, the number of nucleotides (nt) present in the PAMmer between the specificity segment and the orientation segment is 100 nt or less (e.g., 90 nt or less, 80 nt or less, 70 nt or less, 60 nt or less, 50 nt or less, 40 nt or less, 30 nt or less, 25 nt or less, 25 nt or less, 20 nt or less, 15 nt or less, or 10 nt or less).

[0495] In some embodiments, the PAM sequence is immediately adjacent to the orientation segment, immediately adjacent to the specificity segment, and/or immediately adjacent to both the orientation segment and the specificity segment. In some embodiments, the number of nucleotides (nt) present in the PAMmer between the PAM sequence and the specificity segment of the PAMmer is in a range of from 0 nt to 10 nt (e.g., 0 nt to 9 nt, 0 nt to 8 nt, 0 nt to 7 nt, 0 nt to 6 nt, 0 nt to 5 nt, 0 nt to 4 nt, 0 nt to 3 nt, 1 nt to 9 nt, 1 nt to 8 nt, 1 nt to 7 nt, 1 nt to 6 nt, 1 nt to 5 nt, 1 nt to 4 nt, 1 nt to 3 nt, 2 nt to 9 nt, 2 nt to 8 nt, 2 nt to 7 nt, 2 nt to 6 nt, 2 nt to 5 nt, 2 nt to 4 nt, or 2 nt to 3 nt). In some embodiments, 10 or less nt (e.g., 9 or less nt, 8 or less nt, 7 or less nt, 6 or less nt, 5 or less nt, 4 or less nt, 3 or less nt, 2 or less nt, 1 or less nt, or no nt) are present in the PAMmer between the PAM sequence and the specificity segment. In some embodiments, the number of nucleotides (nt) present in the PAMmer between the PAM sequence and the orientation segment of the PAMmer is in a range of from 0 nt to 10 nt (e.g., 0 nt to 9 nt, 0 nt to 8 nt, 0 nt to 7 nt, 0 nt to 6 nt, 0 nt to 5 nt, 0 nt to 4 nt, 0 nt to 3 nt, 1 nt to 9 nt, 1 nt to 8 nt, 1 nt to 7 nt, 1 nt to 6 nt, 1 nt to 5 nt, 1 nt to 4 nt, 1 nt to 3 nt, 2 nt to 9 nt, 2 nt to 8 nt, 2 nt to 7 nt, 2 nt to 6 nt, 2 nt to 5 nt, 2 nt to 4 nt, or 2 nt to 3 nt). In some embodiments, 10 or less nt (e.g., 9 or less nt, 8 or less nt, 7 or less nt, 6 or less nt, 5 or less nt, 4 or less nt, 3 or less nt, 2 or less nt, 1 or less nt, or no nt) are present in the PAMmer between the PAM sequence and the orientation segment.

[0496] In some embodiments, a PAMmer has a length (e.g., the PAM sequence and the orientation segment have a combined length) in a range of from 2 nt to 100 nt (e.g., 2 nt to 70 nt, 2 nt to 50 nt, 2 nt to 45 nt, 2 nt to 40 nt, 2 nt to 35 nt, 2 nt to 30 nt, 2 nt to 25 nt, 2 nt to 20 nt, 2 nt to 10 nt, 2 nt to 5 nt, 3 nt to 70 nt, 3 nt to 50 nt, 3 nt to 45 nt, 3 nt to 40 nt, 3 nt to 35 nt, 3 nt to 30 nt, 3 nt to 25 nt, 3 nt to 20 nt, 3 nt to 10 nt, 3 nt to 5 nt, 5 nt to 70 nt, 5 nt to 50 nt, 5 nt to 45 nt, 5 nt to 40 nt, 5 nt to 35 nt, 5 nt to 30 nt, 5 nt to 25 nt, 5 nt to 20 nt, 10 nt to 70 nt, 10 nt to 50 nt, 10 nt to 45 nt, 10 nt to 40 nt, 10 nt to 35 nt, 10 nt to 30 nt, 10 nt to 25 nt, 10 nt to 20 nt, 10 nt to 15 nt, 15 nt to 70 nt, 15 nt to 50 nt, 15 nt to 45 nt, 15 nt to 40 nt, 15 nt to 35 nt, 15 nt to 30 nt, 15 nt to 25 nt, or 15 nt to 20 nt).

[0497] In some cases, a PAMmer is a DNA molecule. In some cases, a PAMmer is an RNA molecule. In some cases, a PAMmer is a hybrid DNA/RNA molecule (e.g., in some cases, at least the PAM seqeunce of the PAMmer is DNA). In some cases the PAMmer has one or more modified nucleic acids (described in more detail below with respect to nucleic acid modifications). In some embodiments, a subject PAMmer has one or more nucleotides that are 2′-O-Methyl modified nucleotides. In some embodiments, a subject PAMmer has one or more 2′ Fluoro modified nucleotides. In some embodiments, a subject PAMmer has one or more LNA bases. In some embodiments, a subject PAMmer has one or more nucleotides that are linked by a phosphorothioate bond (i.e., the subject nucleic acid has one or more phosphorothioate linkages). In some embodiments, a subject PAMmer has a 5′ cap (e.g., a 7-methylguanylate cap (m7G)). In some embodiments, a subject PAMmer has a combination of modified nucleotides. For example, a subject PAMmer can have a 5′ cap (e.g., a 7-methylguanylate cap (m7G)) in addition to having one or more nucleotides with other modifications (e.g., a 2′-O-Methyl nucleotide and/or a 2′ Fluoro modified nucleotide and/or a LNA base and/or a phosphorothioate linkage).

[0498] PAM Sequence

[0499] A wild type Cas9 polypeptide normally has nuclease activity that cleaves a target nucleic acid (e.g., a double stranded DNA (dsDNA)) at a target site defined by the region of complementarity between the targeting segment of the guide nucleic acid and the target nucleic acid. In some cases, site-specific cleavage of the target nucleic acid occurs at locations determined by both (i) base-pairing complementarity between the guide nucleic acid and the target nucleic acid; and (ii) a short motif referred to as the protospacer adjacent motif (PAM) in the target nucleic acid. When a Cas9 polypeptde binds to (in some cases cleaves) a dsDNA target nucleic acid, the PAM sequence that is recognized (bound) by the Cas9 polypeptide is present on the non-complementary strand (the strand that does not hybridize with the targeting segment of the guide nucleic acid) of the target DNA. Thus, when a Cas9 Polypeptide binds to (in some cases cleaves) a single stranded target nucleic acid, no PAM sequence is present because there is no non-complementary strand (see FIG. 8). A subject PAMmer provides a PAM sequence, which is positioned near the target site (the sequence targeted by the targeting segment of the guide nucleic acid) by the orientation segment and/or the specificity segment of the PAMmer.

[0500] In some embodiments, the PAM sequence of the PAMmer is complementary to (i.e., hybridizes with) the target nucleic acid. In some embodiments, the PAM sequence of the PAMmer is not complementary to (i.e., does not hybridize with) the target nucleic acid. In some embodiments, a PAM sequence of a PAMmer has a length in a range of from 1 nt to 15 nt (e.g., 1 nt to 14 nt, 1 nt to 13 nt, 1 nt to 12 nt, 1 nt to 11 nt, 1 nt to 10 nt, 1 nt to 9 nt, 1 nt to 9 nt, 1 nt to 8 nt, 1 nt to 7 nt, 1 nt to 6 nt, 1 nt to 5 nt, 1 nt to 4 nt, 1 nt to 3 nt, 2 nt to 15 nt, 2 nt to 14 nt, 2 nt to 13 nt, 2 nt to 12 nt, 2 nt to 11 nt, 2 nt to 10 nt, 2 nt to 9 nt, 2 nt to 8 nt, 2 nt to 7 nt, 2 nt to 6 nt, 2 nt to 5 nt, 2 nt to 4 nt, 2 nt to 3 nt, 2 nt, or 3 nt).

[0501] In some embodiments (e.g., when the Cas9 heterodimer is derived from S. pyogenes or a closely related Cas9 is used; see for example, Chylinski et al., RNA Biol. 2013 May; 10(5):726-37; and Jinek et al., Science. 2012 Aug. 17; 337(6096):816-21; both of which are hereby incorporated by reference in their entirety), a PAM sequence (e.g., of a target nucleic acid, of a PAMmer, etc.) can be GG (5′-GG-3′), or can be 5′-NGG-3′, where N is any nucleotide. In some embodiments (e.g., when a Cas9 heterodimer is derived from the Cas9 protein of Neisseria meningitidis or a closely related Cas9 is used), the PAM sequence (e.g., of a target nucleic acid, of a PAMmer, etc.) can be 5′-NNNNGANN-3′, 5′-NNNNGTTN-3′, 5′-NNNNGNNT-3′, 5′-NNNNGTNN-3′, 5′-NNNNGNTN-3′, or 5′-NNNNGATT-3′, where N is any nucleotide. In some embodiments (e.g., when a Cas9 heterodimer is derived from Streptococcus thermophilus #1 or a closely related Cas9 is used), the PAM sequence (e.g., of a target nucleic acid, of a PAMmer, etc.) can be 5′-NNAGAA-3′, 5′-NNAGGA-3′, 5′-NNGGAA-3′, 5′-NNANAA-3′, or 5′-NNGGGA-3′ where N is any nucleotide. In some embodiments (e.g., when a Cas9 heterodimer is derived from Treponema denticola (TD) or a closely related Cas9 is used), the PAM sequence (e.g., of a target nucleic acid, of a PAMmer, etc.) can be 5′-NAAAAN-3′, 5′-NAAAAC-3′, 5′-NAAANC-3′, 5′-NANAAC-3′, or 5′-NNAAAC-3′, where N is any nucleotide. As would be known by one of ordinary skill in the art, additional PAM sequences for other Cas9 polypeptides can readily be determined using bioinformatic analysis (e.g, analysis of genomic sequencing data). See Esvelt et al., Nat Methods. 2013 November; 10(11):1116-21, for additional information.

[0502] Also as known in the art, the PAM-interacting domain can be derived from a Cas9 protein from a first species, and the PAM sequence can correspond to that domain. Thus, in some cases, a subject Cas9 heterodimer has a PAM-interacting domain that is derived from a Cas9 protein of a first species, and other portions of the Cas9 heterodimer (e.g., the rest of the Cas9 heterodimer) can be derived from the Cas9 protein of a second species.

[0503] Specificity Segment

[0504] A specificity segment can be present or absent in a subject PAMmer (the PAMmer has a specificity segment, an orientation segment, or both a specificity segment and an orientation segment), and when present, the specificity segment is positioned 5′ of the PAM sequence. As noted above, in some cases, a PAMmer having a specificity segment is referred to herein as a “5′-extended PAMmer.” The specificity segment hybridizes to (i.e., targets) a sequence of a target nucleic that overlaps with the target site such that the PAM sequence is positioned near the target site (i.e., the sequence of the target nucleic acid that is targeted by the targeting segment of the guide nucleic acid). Thus, the PAMmer provides a PAM sequence at any desired location within a target nucleic acid (e.g., by designing the specificity segment of the PAMmer to hybridize to any desired nucleotide sequence of the target nucleic acid).

[0505] In cases where a PAMmer is used in a method of cleavage, the targeting segment of the guide nucleic acid (which associates with a Cas9 heterodimer) is complementary to the target nucleic acid, and this is true whether or not the PAMmer has a specificity segment. In cases where a PAMmer is used in a method of binding, the targeting segment of the guide nucleic acid (which associates with a Cas9 heterodimer) is complementary to the target nucleic acid when the PAMmer has a specificity segment, but the targeting segment of the guide nucleic acid need not be complementary to the target nucleic acid when the PAMmer does not have a specificity segment (i.e., when the PAMmer has PAM sequence and an orientation segment, but not a specificity segment).

[0506] A specificity segment can have a length of from 3 nucleotides (nt) to 100 nt (e.g., from 3 nt to 80 nt, from 3 nt to 50nt, from 3 nt to 40 nt, from 5 nt to 40 nt, from 5 nt to 35 nt, from 5 nt to 30 nt, from 5 nt to 25 nt, from 10 nt to 40 nt, from 10 nt to 35 nt, from 10 nt to 30 nt, from 10 nt to 25 nt, from 10 nt to 20 nt, from 12 nt to 40 nt, from 12 nt to 35 nt, from 12 nt to 30 nt, from 12 nt to 25 nt, from 12 nt to 20 nt, from 15 nt to 40 nt, from 15 nt to 35 nt, from 15 nt to 30 nt, from 15 nt to 25 nt, from 15 nt to 20 nt, from 17 nt to 40 nt, from 17 nt to 35 nt, from 17 nt to 30 nt, from 17 nt to 25 nt, from 17 nt to 20 nt, from 18 nt to 40 nt, from 18 nt to 35 nt, from 18 nt to 30 nt, from 18 nt to 25 nt, from 18 nt to 20 nt, from 20 nt to 40 nt, from 20 nt to 35 nt, from 20 nt to 30 nt, or from 20 nt to 25 nt). In some cases, the specificity segment is 20 nucleotides in length. In some cases, the specificity segment is 19 nucleotides in length.

[0507] The percent complementarity between the specificity segment and the sequence of the target nucleic acid targeted by the specificity segment (e.g., the target site, i.e., the site targeted by the targeting segment of the guide nucleic acid) can be 60% or more (e.g., 65% or more, 70% or more, 75% or more, 80% or more, 85% or more, 90% or more, 95% or more, 97% or more, 98% or more, 99% or more, or 100%). In some cases, the percent complementarity between the specificity segment and the sequence of the target nucleic acid targeted by the specificity segment is 60% or more (e.g., 65% or more, 70% or more, 75% or more, 80% or more, 85% or more, 90% or more, 95% or more, 97% or more, 98% or more, 99% or more, or 100%) over about 10 to 30 contiguous nucleotides (nt) (e.g. 15 to 30 contiguous nt, 15 to 25 contiguous nt, 17 to 30 contiguous t, 17 to 25 contiguous t, or 18 to 22 contiguous nt). In some cases, the percent complementarity between the specificity segment and the sequence of the target nucleic acid targeted by the specificity segment is 60% or more (e.g., 65% or more, 70% or more, 75% or more, 80% or more, 85% or more, 90% or more, 95% or more, 97% or more, 98% or more, 99% or more, or 100%) over 10 or more contiguous nucleotides (nt) (e.g. 12 or more contiguous nt, 15 or more contiguous nt, 17 or more contiguous nt, 18 or more contiguous nt, 19 or more contiguous nt, or 20 or more contiguous nt).

[0508] In some cases, the sequence targeted by the specificity segment of a PAMmer is 100% identical to the target site (i.e., the sequence targeted by the targeting segment of the guide nucleic acid). However, the sequence targeted by the specificity segment of a PAMmer need not be 100% identical to the target site. For example, in some cases, the sequence targeted by the specificity segment of a PAMmer overlaps with the sequence targeted by the targeting segment of the guide nucleic acid, but the overlap is not 100%. For example, the sequence targeted by the specificity segment of a PAMmer can be a subset of the target site. In some cases, the sequence targeted by the specificity segment of a PAMmer is shorter than the sequence targeted by the targeting segment of the guide nucleic acid. In some cases, the sequence targeted by the specificity segment of a PAMmer is longer than the sequence targeted by the targeting segment of the guide nucleic acid. In some cases, the sequence targeted by the specificity segment of a PAMmer is the same length as the sequence targeted by the targeting segment of the guide nucleic acid.

[0509] In some cases, the sequence targeted by the specificity segment of a PAMmer shares 2 nucleotides (nt) or more with the sequence targeted by the targeting segment of the guide nucleic acid (e.g., 3 nt or more, 5 nt or more, 8 nt or more, 10 nt or more, 12 nt or more, 15 nt or more, 18 nt or more, etc.). In some cases, the sequence targeted by the specificity segment of a PAMmer shares 2 nucleotides (nt) to 30 nt with the sequence targeted by the targeting segment of the guide nucleic acid (e.g., 5 nt to 30 nt, 5 nt to 25 nt, 5 nt to 22 nt, 8 nt to 30 nt, 8 nt to 25 nt, 8 nt to 22 nt, 8 nt to 20 nt, 10 nt to 30 nt, 10 nt to 25 nt, 10 nt to 22 nt, 10 nt to 20 nt, 12 nt to 30 nt, 12 nt to 25 nt, 12 nt to 22 nt, 12 nt to 20 nt, 15 nt to 30 nt, 15 nt to 25 nt, 15 nt to 22 nt, 15 nt to 20 nt, 18 nt to 30 nt, 18 nt to 25 nt, 18 nt to 22 nt, or 18 nt to 20 nt).

[0510] In some embodiments, a PAMmer has a specificity segment, but does not have an orientation segment (i.e., the PAMmer does not have a nucleotide sequence 3′ of the PAM sequence that hybridizes with the target nucleic acid) (FIG. 8E). In some such cases, the PAM sequence can be at the 3′ end of the PAMmer (i.e., the PAMmer can have 0 nucleotides 3′ of the PAM sequence), or the PAMmer can have 1 or more nucleotides (nt) 3′ of the PAM sequence (e.g., 2 or more nt, 3 or more nt, 4 or more nt, 5 or more nt, 10 or more nt, 15 or more nt, 20 or more nt, etc.), where the nucleotides 3′ of the PAM sequence do not hybridize to the target nucleic acid. In some cases in which a PAMmer does not have an orientation segment, a PAMmer can have a nucleotide sequence, 3′ of the PAM sequence, with a length in a range of from 1 nucleotide (nt) to 20 nt (e.g., from 1 nt to 18 nt, from 1 nt to 16 nt, from 1 nt to 14 nt, from 1 nt to 12 nt, from 1 nt to 10 nt, from 1 nt to 9 nt, from 1 nt to 8 nt, from 1 nt to 7 nt, from 1 nt to 6 nt, from 1 nt to 5 nt, from 1 nt to 4 nt, or from 1 nt to 3 nt), where the nucleotides 3′ of the PAM sequence do not hybridize to the target nucleic acid. For example, if a PAMmer has nucleotides 3′ of the PAM sequence that do hybridize to the target nucleic acid, then the nucleotides that hybridize would be considered an (or part of an) orientation segment.

[0511] In some cases, the length of the specificity segment inversely correlates with efficiency of the cleavage reaction and positively correlates with specificity (i.e., reduction of off-target effects). Thus, there can be a trade-off between the desired level of cleavage and the desired level of specificity. The presence (as well as the length) of a specificity segment can be determined based on the particular target nucleic acid, the nature/purpose of the method, and/or the desired outcome. For example, if maximum specificity is desired, but cleavage efficiency is not a concern, then a long specificity segment may be desirable. On the other hand, if maximum cleavage is desired, but specificity is not a concern (e.g., the orientation segment of the PAMmer provides for adequate specificity), then a shorter specificity segment (e.g., no specificity segment) may be desirable.

[0512] For methods of binding, the presence of a specificity segment can increase binding specificity. Not to be bound by theory, it is believed that this is because the specificity segment provides an energetic barrier to binding that can be overcome by the presence of a targeting segment in the guide nucleic acid that has complementarity to (i.e., can hybridize with) that target nucleic acid, thus displacing the specificity segment of the PAMmer.

[0513] Orientation Segment

[0514] An orientation segment can be present or absent in a subject PAMmer (the PAMmer has a specificity segment, an orientation segment, or both a specificity segment and an orientation segment), and when present, the orientation segment is positioned 3′ of the PAM seqeunce. The orientation segment hybridizes to (i.e., targets) a sequence of a target nucleic (the orientation site) such that the PAM sequence is positioned near the target site (i.e., the sequence of the target nucleic acid that is targeted by the targeting segment of the guide nucleic acid). Thus, the PAMmer provides a PAM sequence at any desired location within a target nucleic acid (e.g., by designing the orientation segment of the PAMmer to hybridize to any desired nucleotide sequence of the target nucleic acid).

[0515] The orientation segment can have a length of from 3 nucleotides (nt) to 100 nt (e.g., from 3 nt to 80 nt, from 3 nt to 50nt, from 3 nt to 40 nt, from 5 nt to 40 nt, from 5 nt to 35 nt, from 5 nt to 30 nt, from 5 nt to 25 nt, from 10 nt to 40 nt, from 10 nt to 35 nt, from 10 nt to 30 nt, from 10 nt to 25 nt, from 10 nt to 20 nt, from 12 nt to 40 nt, from 12 nt to 35 nt, from 12 nt to 30 nt, from 12 nt to 25 nt, from 12 nt to 20 nt, from 15 nt to 40 nt, from 15 nt to 35 nt, from 15 nt to 30 nt, from 15 nt to 25 nt, from 15 nt to 20 nt, from 17 nt to 40 nt, from 17 nt to 35 nt, from 17 nt to 30 nt, from 17 nt to 25 nt, from 17 nt to 20 nt, from 18 nt to 40 nt, from 18 nt to 35 nt, from 18 nt to 30 nt, from 18 nt to 25 nt, from 18 nt to 20 nt, from 20 nt to 40 nt, from 20 nt to 35 nt, from 20 nt to 30 nt, or from 20 nt to 25 nt). In some cases, the orientation segment is 20 nucleotides in length. In some cases, the orientation segment is 19 nucleotides in length.

[0516] The percent complementarity between the orientation segment and the sequence of the target nucleic acid targeted by the orientation segment can be 60% or more (e.g., 65% or more, 70% or more, 75% or more, 80% or more, 85% or more, 90% or more, 95% or more, 97% or more, 98% or more, 99% or more, or 100%). In some cases, the percent complementarity between the orientation segment and the sequence of the target nucleic acid targeted by the orientation segment is 60% or more (e.g., 65% or more, 70% or more, 75% or more, 80% or more, 85% or more, 90% or more, 95% or more, 97% or more, 98% or more, 99% or more, or 100%) over about 10 to 30 contiguous nucleotides (nt) (e.g. 15 to 30 contiguous nt, 15 to 25 contiguous nt, 17 to 30 contiguous nt, 17 to 25 contiguous nt, or 18 to 22 contiguous nt). In some cases, the percent complementarity between the orientation segment and the sequence of the target nucleic acid targeted by the orientation segment is 60% or more (e.g., 65% or more, 70% or more, 75% or more, 80% or more, 85% or more, 90% or more, 95% or more, 97% or more, 98% or more, 99% or more, or 100%) over 10 or more contiguous nucleotides (nt) (e.g. 12 or more contiguous nt, 15 or more contiguous nt, 17 or more contiguous nt, 18 or more contiguous nt, 19 or more contiguous nt, or 20 or more contiguous nt).

[0517] In some cases, the sequence targeted by the orientation segment of a PAMmer is immediately adjacent to the sequence targeted by the targeting segment of the guide nucleic acid. In some embodiments, 10 or less nt (e.g., 9 or less nt, 8 or less nt, 7 or less nt, 6 or less nt, 5 or less nt, 4 or less nt, 3 or less nt, 2 or less nt, 1 or less nt, or no nt) are present in the target nucleic acid between the sequence targeted by the targeting segment of the guide nucleic acid (i.e., the target site) and the sequence targeted by the orientation segment of the PAMmer. In some cases, the sequence of the target nucleic acid that is targeted by the orientation segment of a PAMmer is within 10 or fewer nucleotides (nt) (e.g., 9 or fewer nt, 8 or fewer nt, 7 or fewer nt, 6 or fewer nt, 5 or fewer nt, 4 or fewer nt, 3 or fewer nt, 2 or fewer nt, 1 or fewer nt, or no nt) of the sequence targeted by the targeting segment of the guide nucleic acid. In some embodiments, the number of nucleotides (nt) present in the target nucleic acid between the sequence targeted by the targeting segment of the guide nucleic acid (i.e., the target site) and the sequence targeted by the orientation segment of the PAMmer is in a range of from 0 nt to 10 nt (e.g., 0 nt to 9 nt, 0 nt to 8 nt, 0 nt to 7 nt, 0 nt to 6 nt, 0 nt to 5 nt, 0 nt to 4 nt, 0 nt to 3 nt, 1 nt to 9 nt, 1 nt to 8 nt, 1 nt to 7 nt, 1 nt to 6 nt, 1 nt to 5 nt, 1 nt to 4 nt, 1 nt to 3 nt, 2 nt to 9 nt, 2 nt to 8 nt, 2 nt to 7 nt, 2 nt to 6 nt, 2 nt to 5 nt, 2 nt to 4 nt, or 2 nt to 3 nt).

[0518] In some cases, a PAMmer has an orientation segment, but does not have a specificity segment (i.e., the PAMmer does not have a nucleotide sequence 5′ of the PAM sequence that hybridizes with the target nucleic acid), but does have an orientation segment (FIG. 8F). In some such cases, the PAM sequence can be at the 5′ end of the PAMmer (i.e., the PAMmer can have 0 nucleotides 5′ of the PAM sequence), or the PAMmer can have 1 or more nucleotides (nt) 5′ of the PAM sequence (e.g., 2 or more nt, 3 or more nt, 4 or more nt, 5 or more nt, 10 or more nt, 15 or more nt, 20 or more nt, etc.), where the nucleotides 5′ of the PAM sequence do not hybridize to the target nucleic acid. In some cases in which a PAMmer does not have a specificity segment, a PAMmer can have a nucleotide sequence, 5′ of the PAM sequence, with a length in a range of from 1 nucleotide (nt) to 20 nt (e.g., from 1 nt to 18 nt, from 1 nt to 16 nt, from 1 nt to 14 nt, from 1 nt to 12 nt, from 1 nt to 10 nt, from 1 nt to 9 nt, from 1 nt to 8 nt, from 1 nt to 7 nt, from 1 nt to 6 nt, from 1 nt to 5 nt, from 1 nt to 4 nt, or from 1 nt to 3 nt), where the nucleotides 5′ of the PAM sequence do not hybridize to the target nucleic acid. For example, if a PAMmer has nucleotides 5′ of the PAM sequence that do hybridize to the target nucleic acid, then the nucleotides that hybridize would be considered a (or part of a) specificity segment.

[0519] In some cases (e.g., those involving methods of binding, where the PAMmer does not have a specificity segment), the target site of the target nucleic acid can be determined by the orientation segment of the PAMmer and not by the targeting segment of the guide nucleic acid. In some cases, the targeting segment of the guide nucleic acid does not have complementarity to a nucleotide sequence of the target nucleic acid. In some cases, the targeting segment of the guide nucleic acid does not have complementarity to a nucleotide sequence of the target nucleic acid that is near (e.g., within 20 or fewer nucleotides (nt), within 30 or fewer nt, within 40 or fewer t, within 50 or fewer nt, within 60 or fewer nt, within 70 or fewer nt, within 80 or fewer nt, within 90 or fewer nt, or within 100 or fewer nt) the orientation site. However, the orientation segment of the PAMmer still positions the PAM sequence of the PAMmer such that the target nucleic acid can still be bound and/or cleaved by a subject Cas9 polypeptide (Cas9 heterodimer).

[0520] Methods

[0521] A Cas9 heterodimer of the present disclosure finds use in a variety of methods. A subject Cas9 heterodimer (split Cas9) can be used in any method that a Cas9 protein can be used. For example, a Cas9 heterodimer (a split Cas9, in some cases a variant split Cas9 protein) can be used to (i) modify (e.g., cleave, e.g., nick; methylate; etc.) target nucleic acid (DNA or RNA; single stranded or double stranded); (ii) modulate transcription of a target nucleic acid; (iii) label a target nucleic acid (e.g., using a PAMmer); (iv) bind a target nucleic acid (e.g., for purposes of isolation, labeling, imaging, tracking, etc); (v) modify a polypeptide (e.g., a histone) associated with a target nucleic acid; and the like. Because a method that uses a Cas9 heterodimer includes binding of the heterodimer to a particular region in a target nucleic acid (by virtue of being targeted there by an associated Cas9 guide RNA), the methods are generally referred to herein as methods of binding (e.g., a method of binding a target nucleic acid). However, it is to be understood that in some cases, while a method of binding may result in nothing more than binding of the target nucleic acid, in other cases, the method can have different final results (e.g., the method can result in modification of the target nucleic acid, e.g., cleavage/methylation/etc., modulation of transcription from the target nucleic acid, modulation of translation of the target nucleic acid, genome editing, modulation of a protein associated with the target nucleic acid, isolation of the target nucleic acid, etc.). For examples of suitable methods, Cas9 variants, guide RNAs, etc., see, for example, Jinek et al., Science. 2012 Aug. 17; 337(6096):816-21; Chylinski et al., RNA Biol. 2013 May; 10(5):726-37; Ma et al., Biomed Res Int. 2013; 2013:270805; Hou et al., Proc Natl Acad Sci USA. 2013 Sep. 24; 110(39):15644-9; Jinek et al., Elife. 2013;2:e00471; Pattanayak et al., Nat Biotechnol. 2013 September; 31(9):839-43; Qi et al, Cell. 2013 Feb. 28; 152(5):1173-83; Wang et al., Cell. 2013 May 9; 153(4):910-8; Auer et. al., Genome Res. 2013 Oct. 31; Chen et. al., Nucleic Acids Res. 2013 Nov. 1; 41(20):e19; Cheng et. al., Cell Res. 2013 October; 23(10):1163-71; Cho et. al., Genetics. 2013 November; 195(3):1177-80; DiCarlo et al., Nucleic Acids Res. 2013 April; 41(7):4336-43; Dickinson et. al., Nat Methods. 2013 October; 10(10):1028-34; Ebina et. al., Sci Rep. 2013; 3:2510; Fujii et. al, Nucleic Acids Res. 2013 Nov. 1; 41(20):e187; Hu et. al., Cell Res. 2013 November; 23(11):1322-5; Jiang et. al., Nucleic Acids Res. 2013 Nov. 1; 41(20):e188; Larson et. al., Nat Protoc. 2013 November; 8(11):2180-96; Mali et. at., Nat Methods. 2013 October; 10(10):957-63; Nakayama et. al., Genesis. 2013 December; 51(12):835-43; Ran et. al., Nat Protoc. 2013 November; 8(11):2281-308; Ran et. al., Cell. 2013 Sep. 12; 154(6):1380-9; Upadhyay et. al., G3 (Bethesda). 2013 Dec. 9; 3(12):2233-8; Walsh et. al., Proc Natl Acad Sci USA. 2013 Sep. 24; 110(39):15514-5; Xie et. al., Mol Plant. 2013 Oct. 9; Yang et. al., Cell. 2013 Sep. 12; 154(6):1370-9; and U.S. patents and patent applications: U.S. Pat. No. 8,906,616; 8,895,308; 8,889,418; 8,889,356; 8,871,445; 8,865,406; 8,795,965; 8,771,945; 8,697,359; 20140068797; 20140170753; 20140179006; 20140179770; 20140186843; 20140186919; 20140186958; 20140189896; 20140227787; 20140234972; 20140242664; 20140242699; 20140242700; 20140242702; 20140248702; 20140256046; 20140273037; 20140273226; 20140273230; 20140273231; 20140273232; 20140273233; 20140273234; 20140273235; 20140287938; 20140295556; 20140295557; 20140298547; 20140304853; 20140309487; 20140310828; 20140310830; 20140315985; 20140335063; 20140335620; 20140342456; 20140342457; 20140342458; 20140349400; 20140349405; 20140356867; 20140356956; 20140356958; 20140356959; 20140357523; 20140357530; 20140364333; and 20140377868; all of which are hereby incorporated by reference in their entirety.

[0522] For example, the present disclosure provides (but is not limited to) methods of cleaving a target nucleic acid; methods of editing a target nucleic acid; methods of modulating transcription from a target nucleic acid; methods of isolating a target nucleic acid, methods of binding a target nucleic acid, methods of imaging a target nucleic acid, methods of modifying a target nucleic acid, and the like.

[0523] As used herein, the terms/phrases “contact a target nucleic acid” and “contacting a target nucleic acid”, for example, with a split Cas9 (a Cas9 heterodimer), with a subject system, etc. encompass all methods for contacting the target nucleic acid. For example, a Cas9 heterodimer can be provided as protein, RNA (encoding the split Cas9), or DNA (encoding the split Cas9); while a Cas9 guide RNA can be provided as a guide RNA or as a nucleic acid encoding the guide RNA. As such, when, for example, performing a method in a cell (e.g., inside of a cell in vitro, inside of a cell in vivo, inside of a cell ex vivo), a method that includes contacting the target nucleic acid encompasses the introduction into the cell of any or all of the components in their active/final state (e.g., in the form of a protein(s) for split Cas9, in the form of an RNA in some cases for the guide RNA), and also encompasses the introduction into the cell of one or more nucleic acids encoding one or more of the components (e.g., nucleic acid(s) having nucleotide sequence(s) encoding split Cas9 protein(s), nucleic acid(s) having nucleotide sequence(s) encoding guide RNA(s), and the like). Because the methods can also be performed in vitro outside of a cell, a method that includes contacting a target nucleic acid, (unless otherwise specified) encompasses contacting outside of a cell in vitro, inside of a cell in vitro, inside of a cell in vivo, inside of a cell ex vivo, etc.

[0524] In some cases, a subject method is a method that includes contacting a target nucleic acid with a subject Cas9 heterodimer. In some cases, a subject method includes contacting a target nucleic acid with a Cas9 heterodimer and a Cas9 guide RNA (e.g., a truncated Cas9 guide RNA, e.g., not having stem loops 2 or 3). In some cases, a subject method includes contacting a target nucleic acid with a Cas9 heterodimer and a Cas9 guide RNA (e.g., a truncated guide RNA, e.g., not having stem loops 2 or 3) and a dimerizer (e.g., light, a dimerizing agent, etc.). In some cases, a method is a method of contacting a target nucleic acid with a system. In some cases, the system can include: (i) a subject Cas9 heterodimer and a Cas9 guide RNA; (ii) a subject Cas9 heterodimer and a Cas9 guide RNA and a dimerizer; or (iii) a subject Cas9 heterodimer and a Cas9 guide RNA and a dimerizer and a donor polynucleotide.

[0525] Target Nucleic Acids and Target Cells of Interest

[0526] A target nucleic acid can be any nucleic acid (e.g., DNA, RNA), can be double strand or single stranded, can be any type of nucleic acid (e.g., a chromosome, derived from a chromosome, chromosomal, plasmid, viral, extracellular, intracellular, mitochondrial, chloroplast, linear, circular, etc.) and can be from any organism (e.g., as long as the Cas9 guide RNA can hybridize to a target sequence in a target nucleic acid, that target nucleic acid can be targeted).

[0527] A target nucleic acid can be DNA or RNA. A target nucleic acid can be double stranded (e.g., dsDNA, dsRNA) or single stranded (e.g., ssRNA, ssDNA). In some cases, a target nucleic acid is single stranded. In some cases, a target nucleic acid is a single stranded RNA (ssRNA). In some cases, a target ssRNA (e.g., a target cell ssRNA, a viral ssRNA, etc.) is selected from: mRNA, rRNA, tRNA, non-coding RNA (ncRNA), long non-coding RNA (lncRNA), and microRNA (miRNA). In some cases, a target nucleic acid is a single stranded DNA (ssDNA) (e.g., a viral DNA). As noted above, in some cases, a target nucleic acid is single stranded. In some such cases, methods in which the target nucleic acid is single stranded, the method includes the use of a PAMmer (e.g., so that a PAM sequence is present at the target).

[0528] A target nucleic acid can be located anywhere, for example, outside of a cell in vitro, inside of a cell in vitro, inside of a cell in vivo, inside of a cell ex vivo. Suitable target cells (which can comprise target nucleic acids) include, but are not limited to: a bacterial cell; an archaeal cell; a cell of a single-cell eukaryotic organism; a plant cell; an algal cell, e.g., Botryococcus braunii, Chlamydomonas reinhardtii, Nannochloropsis gaditana, Chlorella pyrenoidosa, Sargassum patens C. Agardh, and the like; a fungal cell (e.g., a yeast cell); an animal cell; a cell from an invertebrate animal (e.g. fruit fly, cnidarian, echinoderm, nematode, etc.); a cell from a vertebrate animal (e.g., fish, amphibian, reptile, bird, mammal); a cell from a mammal (e.g., a cell from a rodent, a cell from a human, etc.); and the like. Any type of cell may be of interest (e.g. a stem cell, e.g. an embryonic stem (ES) cell, an induced pluripotent stem (iPS) cell, a germ cell (e.g., an oocyte, a sperm, an oogonia, a speratogonia, etc.), a somatic cell, e.g. a fibroblast, a hematopoietic cell, a neuron, a muscle cell, a bone cell, a hepatocyte, a pancreatic cell; an in vitro or in vivo embryonic cell of an embryo at any stage, e.g., a 1-cell, 2-cell, 4-cell, 8-cell, etc. stage zebrafish embryo; etc.). Cells may be from established cell lines or they may be primary cells, where “primary cells”, “primary cell lines”, and “primary cultures” are used interchangeably herein to refer to cells and cells cultures that have been derived from a subject and allowed to grow in vitro for a limited number of passages, i.e. splittings, of the culture. For example, primary cultures are cultures that may have been passaged 0 times, 1 time, 2 times, 4 times, 5 times, 10 times, or 15 times, but not enough times go through the crisis stage. Typically, the primary cell lines are maintained for fewer than 10 passages in vitro. Target cells can be unicellular organisms and/or can be grown in culture. If the cells are primary cells, they may be harvest from an individual by any convenient method. For example, leukocytes may be conveniently harvested by apheresis, leukocytapheresis, density gradient separation, etc., while cells from tissues such as skin, muscle, bone marrow, spleen, liver, pancreas, lung, intestine, stomach, etc. can be conveniently harvested by biopsy.

[0529] In some of the above applications, the subject methods may be employed to induce target nucleic acid cleavage, target nucleic acid modification, and/or to bind target nucleic acids (e.g., for visualization, for collecting and/or analyzing, etc.) in mitotic or post-mitotic cells in vivo and/or ex vivo and/or in vitro (e.g., to disrupt production of a protein encoded by a targeted mRNA). Because the guide RNA provides specificity by hybridizing to target nucleic acid, a mitotic and/or post-mitotic cell of interest in the disclosed methods may include a cell from any organism (e.g. a bacterial cell, an archaeal cell, a cell of a single-cell eukaryotic organism, a plant cell, an algal cell, e.g., Botryococcus braunii, Chlamydomonas reinhardtii, Nannochloropsis gaditana, Chlorella pyrenoidosa, Sargassum patens C. Agardh, and the like, a fungal cell (e.g., a yeast cell), an animal cell, a cell from an invertebrate animal (e.g. fruit fly, cnidarian, echinoderm, nematode, etc.), a cell from a vertebrate animal (e.g., fish, amphibian, reptile, bird, mammal), a cell from a mammal, a cell from a rodent, a cell from a human, etc.).

[0530] Introducing Components into a Target Cell

[0531] A Cas9 guide RNA (or a nucleic acid comprising a nucleotide sequence encoding same), a PAMmer (or a nucleic acid comprising a nucleotide sequence encoding same), and/or a Cas9 heterodimer (or a nucleic acid comprising a nucleotide sequence encoding same) and/or a donor polynucleotide can be introduced into a host cell by any of a variety of well-known methods.

[0532] Methods of introducing a nucleic acid into a host cell are known in the art, and any known method can be used to introduce a nucleic acid (e.g., an expression construct) into a stem cell or progenitor cell. Suitable methods include, include e.g., viral or bacteriophage infection, transfection, conjugation, protoplast fusion, lipofection, electroporation, calcium phosphate precipitation, polyethyleneimine (PEI)-mediated transfection, DEAE-dextran mediated transfection, liposome-mediated transfection, particle gun technology, calcium phosphate precipitation, direct micro injection, nanoparticle-mediated nucleic acid delivery (see, e.g., Panyam et., al Adv Drug Deliv Rev. 2012 Sep. 13. pii: 50169-409X(12)00283-9. doi: 10.1016/j.addr.2012.09.023), and the like. Any or all of the components can be introduced into a cell as a composition (e.g., including any convenient combination of: a Cas9 heterodimer, a Cas9 guide RNA, a dimerizing agent, a donor polynucleotide, etc.) using known methods, e.g., such as nucleofection.

[0533] Cell Synchronization

[0534] In some embodiments, a subject method includes a step of blocking a cell at a desired phase in the cell cycle (e.g., blocking a cell at S phase, blocking a cell at M phase, etc.), which can increase efficiency of Cas9 mediated methods (e.g., methods that include cleavage). In some cases, a subject method includes a step of contacting a target cell with a cell cycle blocking agent that blocks the target cell at a desired phase in the cell cycle. In some embodiments, a subject method includes a step of enriching a cell population for cells that are in a desired phase(s) of the cell cycle.

[0535] Thus, in some embodiments, subject methods include (i) the step of enriching a cell population for cells that are in a desired phase(s) of the cell cycle, and/or (ii) the step of blocking a cell at a desired phase in the cell cycle. The cell cycle is the series of events that take place in a cell leading to its division and duplication (replication) that produces two daughter cells. Two major phases of the cell cycle are the S phase (DNA synthesis phase), in which DNA duplication occurs, and the M phase (mitosis), in which the chromosomes segregation and cell division occurs. The eukaryotic cell cycle is traditionally divided into four sequential phases: G1, S, G2, and M. G1, S, and G2 together can collectively be referred to as “interphase”. Under certain conditions, cells can delay progress through G1 and can enter a specialized resting state known as G0 (G zero), in which they can remain for days, weeks, or even years before resuming proliferation. The period of transition from one state to another can be referred to using a hyphen, for example, G1/S, G2/M, etc. As is known in the art, various checkpoints exist throughout the cell cycle at which a cell can monitor conditions to determine whether cell cycle progression should occur. For example, the G2/M DNA damage checkpoint serves to prevent cells from entering mitosis (M-phase) with genomic DNA damage.

[0536] A step of enriching a population of eukaryotic cells for cells in a desired phase of the cell cycle (e.g., G1, S, G2, M, G1/S, G2/M, G0, etc., or any combination thereof), and can be performed using any convenient method (e.g., a cell separation method and/or a cell synchronization method).

[0537] In some cases, a subject method includes a step of enriching a population of eukaryotic cells for cells in the G0 phase of the cell cycle. For example, in some cases, a subject method includes: (a) enriching a population of eukaryotic cells for cells in the GO phase of the cell cycle; and (b) contacting the target DNA with a split-Cas9, a Cas9 guide RNA, and a dimerizing agent.

[0538] In some cases, a subject method includes a step of enriching a population of eukaryotic cells for cells in the G1 phase of the cell cycle. For example, in some cases, a subject method includes: (a) enriching a population of eukaryotic cells for cells in the G1 phase of the cell cycle; and (b) contacting the target DNA with a split-Cas9, a Cas9 guide RNA, and a dimerizing agent.

[0539] In some cases, a subject method includes a step of enriching a population of eukaryotic cells for cells in the G2 phase of the cell cycle. For example, in some cases, a subject method includes: (a) enriching a population of eukaryotic cells for cells in the G2 phase of the cell cycle; and (b) contacting the target DNA with a split-Cas9, a Cas9 guide RNA, and a dimerizing agent.

[0540] In some cases, a subject method includes a step of enriching a population of eukaryotic cells for cells in the S phase of the cell cycle. For example, in some cases, a subject method includes: (a) enriching a population of eukaryotic cells for cells in the S phase of the cell cycle; and (b) contacting the target DNA with a split-Cas9, a Cas9 guide RNA, and a dimerizing agent.

[0541] In some cases, a subject method includes a step of enriching a population of eukaryotic cells for cells in the M phase of the cell cycle. For example, in some cases, a subject method includes: (a) enriching a population of eukaryotic cells for cells in the M phase of the cell cycle; and (b) contacting the target DNA with a split-Cas9, a Cas9 guide RNA, and a dimerizing agent.

[0542] In some cases, a subject method includes a step of enriching a population of eukaryotic cells for cells in the G1/S transition of the cell cycle. For example, in some cases, a subject method includes: (a) enriching a population of eukaryotic cells for cells in the G1/S transition of the cell cycle; and (b) contacting the target DNA with a Cas9 targeting complex (e.g., via introducing into the target eukaryotic cell(s) at least one component of a Cas9 targeting complex)(e.g., contacting the target DNA with a split-Cas9, a Cas9 guide RNA, and a dimerizing agent.

[0543] In some cases, a subject method includes a step of enriching a population of eukaryotic cells for cells in the G2/M transition of the cell cycle. For example, in some cases, a subject method includes: (a) enriching a population of eukaryotic cells for cells in the G2/M transition of the cell cycle; and (b) contacting the target DNA with a Cas9 targeting complex (e.g., via introducing into the target eukaryotic cell(s) at least one component of a Cas9 targeting complex) (e.g., contacting the target DNA with a split-Cas9, a Cas9 guide RNA, and a dimerizing agent.

[0544] By “enrich” is meant increasing the fraction of desired cells in the resulting cell population. For example, in some cases, enriching includes selecting desirable cells (e.g., cells that are in the desired phase of the cell cycle) away from undesirable cells (e.g., cells that are not in the desired phase of the cell cycle), which can result in a smaller population of cells, but a greater fraction (i.e., higher percentage) of the cells of the resulting cell population will be desirable cells (e.g., cells that are in the desired phase of the cell cycle). Cell separation methods (described below) can be an example of this type of enrichment. In other cases, enriching includes converting undesirable cells (e.g., cells that are not in the desired phase of the cell cycle) into desirable cells (e.g., cells that are in the desired phase of the cell cycle), which can result in a similar size population of cells as the starting population, but a greater fraction of those cells will be desirable cells (e.g., cells that are in the desired phase of the cell cycle). Cell synchronization methods (described below) can be an example of this type of enrichment. In some cases, enrichment can both change the overall size of the resulting cell population (compared to the size of the starting population) and increase the fraction of desirable cells. For example, multiple methods/techniques can be combined (e.g., to improve enrichment, to enrich for cells a more than one desired phase of the cell cycle, etc.).

[0545] In some cases, enriching includes a cell separation method. Any convenient cell separation method can be used to enrich for cells that are at various phases of the cell cycle. Suitable cell separation techniques for enrichment of cells at particular phases of the cell cycle include, but are not limited to: (i) mitotic shake-off (M-phase; mechanical separation on the basis of cell adhesion properties, e.g., adherent cells in the mitotic phase detach from the surface upon gentle shaking, tapping, or rinsing); (ii) Countercurrent centrifugal elutriation (CCE) (G1, S, G2/M, and intermediate states; physical separation on the basis of cell size and density); and (iii) flow cytometry and cell sorting (e.g., G0, G1, S, G2/M; physical separation based on specific intracellular, e.g., DNA, content) and cell surface and/or size properties).

[0546] Mitotic shake-off generally includes dislodgment of low adhesive, mitotic cells by agitation (see for example, Beyrouthy et. al., PLoS ONE 3, e3943 (2008); Schorl, C. & Sedivy, Methods 41, 143-150 (2007)). CCE generally includes the separation of cells according to their sedimentation velocity in a gravitational field where the liquid containing the cells is made to flow against the centrifugal force with the sedimentation rate of cells being proportional to their size (see for example, Grosse et. al., Prep Biochem Biotechnol. 2012;42(3):217-33; Banfalvi et. al., Nat. Protoc. 3, 663-673 (2008)). Flow cytometry methods generally include the characterization of cells according to antibody and/or ligand and/or dye-mediated fluorescence and scattered light in a hydrodynamically focused stream of liquid with subsequent electrostatic, mechanical or fluidic switching sorting (see for example, Coquelle et. al., Biochem. Pharmacol. 72, 1396-1404 (2006); Juan et. al., Cytometry 49, 170-175 (2002)). For more information related to cell separation techniques, refer to, for example, Rosner et al., Nat Protoc. 2013 March; 8(3):602-26.

[0547] In some cases, enriching includes a cell synchronization method (i.e., synchronizing the cells of a cell population). Cell synchronization is a process by which cells at different stages of the cell cycle within a cell population (i.e., a population of cells in which various individual cells are in different phases of the cycle) are brought into the same phase. Any convenient cell synchronization method can be used in the subject methods to enrich for cells that are at a desired phase(s) of the cell cycle. For example, cell synchronization can be achieved by blocking cells at a desired phase in the cell cycle, which allows the other cells to cycle until they reach the blocked phase. For example, suitable methods of cell synchronization include, but are not limited to: (i) inhibition of DNA replication, DNA synthesis, and/or mitotic spindle formation (e.g., sometimes referred to herein as contacting a cell with a cell cycle blocking composition); (ii) mitogen or growth factor withdrawal (G0, G1, G0/G1; growth restriction—induced quiescence via, e.g., serum starvation and/or amino acid starvation); and (iii) density arrest (G1; cell-cell contact—induced activation of specific transcriptional programs) (see for example, Rosner et al., Nat Protoc. 2013 March; 8(3):602-26 (e.g., see Table 1 of Rosner et al.), which is hereby incorporated by reference in its entirety, and see references cited therein).

[0548] Various methods for cell synchronization will be known to one of ordinary skill in the art and any convenient method can be used. For additional methods for cell synchronization (e.g., synchronization of plant cells), see, for example, Sharma, Methods in Cell Science, 1999, Volume 21, Issue 2-3, pp 73-78 (“Synchronization in plant cells—an introduction”); Dolezel et al., Methods in Cell Science, 1999, Volume 21, Issue 2-3, pp 95-107 (“Cell cycle synchronization in plant root meristems”); Kumagai-Sano et al., Nat Protoc. 2006; 1(6):2621-7; and Cools et al., The Plant Journal (2010) 64, 705-714; and Rosner et al., Nat Protoc. 2013 March; 8(3):602-26; all of which are hereby incorporated by reference in their entirety.

[0549] Cell Cycle Blocking Compositions

[0550] In some embodiments, a cell (or cells of a cell population), is blocked at a desired phase of the cell cycle (e.g., by contacting the cell with a cycle blocking composition). In some embodiments, cells of a cell population are synchronized (e.g., by contacting the cells with a cell cycle blocking composition). A cell cycle blocking composition can include one or more cell cycle blocking agents. The term “cell cycle blocking agent” is used herein to refer to an agent that blocks (e.g., reversibly blocks (pauses), irreversibly blocks) a cell at a particular point in the cell cycle such that the cell cannot proceed further. Suitable cell cycle blocking agents include reversible cell cycle blocking agents. Reversible cell cycle blocking agents do not render the cell permanently blocked. In other words, when reversible cell cycle blocking agent is removed from the cell medium, the cell is free to proceed through the cell cycle. Cell cycle blocking agents are sometimes referred to in the art as cell synchronization agents because when such agents contact a cell population (e.g., a population having cells that are at different stages of the cell cycle), the cells of the population become blocked at the same phase of the cell cycle, thus synchronizing the population of cells relative to that particular phase of the cell cycle. When the cell cycle blocking agent used is reversible, the cells can then be “released” from cell cycle block.

[0551] Suitable cell cycle blocking agents include, but are not limited to: nocodazole (G2, M, G2/M; inhibition of microtubule polymerization), colchicine (G2, M, G2/M; inhibition of microtubule polymerization); demecolcine (colcemid) (G2, M, G2/M; inhibition of microtubule polymerization); hydroxyurea (G1, S, G1/S; inhibition of ribonucleotide reductase); aphidicolin (G1, S, G1/S; inhibition of DNA polymerase-α and DNA polymerase-δ); lovastatin (G1; inhibition of HMG-CoA reductase/cholesterol synthesis and the proteasome); mimosine (G1, S, G1/S; inhibition of thymidine, nucleotide biosynthesis, inhibition of Ctf4/chromatin binding); thymidine (G1, S, G1/S; excess thymidine-induced feedback inhibition of DNA replication); latrunculin A (M; delays anaphase onset, actin polymerization inhibitor, disrupts interpolar microtubule stability); and latrunculin B (M; actin polymerization inhibitor).

[0552] Suitable cell cycle blocking agents can include any agent that has the same or similar function as the agents above (e.g., an agent that inhibits microtubule polymerization, an agent that inhibits ribonucleotide reductase, an agent that inhibits DNA polymerase-α and/or DNA polymerase-δ, an agent that inhibits HMG-CoA reductase and/or cholesterol synthesis, an agent that inhibits nucleotide biosynthesis, an agent that inhibits DNA replication, i.e., inhibit DNA synthesis, an agent that inhibits initiation of DNA replication, an agent that inhibits deoxycytosine synthesis, an agent that induces excess thymidine-induced feedback inhibition of DNA replication, and agent that disrupts interpolar microtubule stability, an agent that inhibits actin polymerization, and the like). Suitable agents that block G1 can include: staurosporine, dimethyl sulfoxide (DMSO), glycocorticosteroids, and/or mevalonate synthesis inhibitors. Suitable agents that block G2 phase can include CDK1 inhibitors e.g., RO-3306. Suitable agents that block M can include cytochalasin D.

[0553] In some cases, suitable cell cycle blocking agents include: cobtorin; dinitroaniline; benefin (benluralin); butralin; dinitramine; ethalfluralin; oryzalin; pendimethalin; trifluralin; amiprophos-methyl; butamiphos dithiopyr; thiazopyr propyzamider-pronamide-tebutam DCPA (chlorthal-dimethyl); anisomycin; alpha amanitin; jasmonic acid; abscisic acid; menadione; cryptogeine; hydrogen peroxide; sodium permanganate; indomethacin; epoxomycin; lactacystein; icrf 193; olomoucine; roscovitine; bohemine; K252a; okadaic acid; endothal; caffeine; MG132; cycline dependent kinase inhibitors; and the like.

[0554] For more information regarding cell cycle blocking agents, see Merrill G F, Methods Cell Biol. 1998; 57:229-49, which is hereby incorporated by reference in its entirety.

### EXAMPLES

[0555] The following examples are put forth so as to provide those of ordinary skill in the art with a complete disclosure and description of how to make and use the present invention, and are not intended to limit the scope of what the inventors regard as their invention nor are they intended to represent that the experiments below are all or the only experiments performed. Efforts have been made to ensure accuracy with respect to numbers used (e.g. amounts, temperature, etc.) but some experimental errors and deviations should be accounted for. Unless indicated otherwise, parts are parts by weight, molecular weight is weight average molecular weight, temperature is in degrees Celsius, and pressure is at or near atmospheric. Standard abbreviations may be used, e.g., bp, base pair(s); kb, kilobase(s); pl, picoliter(s); s or sec, second(s); min, minute(s); h or hr, hour(s); aa, amino acid(s); kb, kilobase(s); bp, base pair(s); nt, nucleotide(s); i.m., intramuscular(ly); i.p., intraperitoneal(ly); s.c., subcutaneous(ly); and the like.

[0556] While the present invention has been described with reference to the specific embodiments thereof, it should be understood by those skilled in the art that various changes may be made and equivalents may be substituted without departing from the true spirit and scope of the invention. In addition, many modifications may be made to adapt a particular situation, material, composition of matter, process, process step or steps, to the objective, spirit and scope of the present invention. All such modifications are intended to be within the scope of the claims appended hereto.

### Example 1

[0557] All amino acid positions listed below (unless otherwise denoted) are relative to S. pyogenes Cas9 (GenBank ESU85303; SEQ ID NO: 1545), but can readily be adapted to the corresponding positions/domains of any Cas9 protein.

[0558] Results

[0559] Design of Split-Cas9 (Cas9 Heterodimer)

[0560] Sites were selected for the N and C termini of the alpha-helical lobe and sites were also selected for the junction between the RuvCI and RuvCII polypeptides in the nuclease lobe (FIG. 1A). G56 was selected as the N-terminus for the alpha-helical lobe due to its location in a poorly-conserved linker just before the arginine-rich bridge helix, which has been shown to be critical for Cas9 cleavage activity in human cells. The C-terminus of the alpha-helical lobe was selected to be at 5714, located in a linker between the two lobes. For the nuclease lobe, RuvCI was maintained through E57 and RuvCII began with G729. RuvCI was connected to RuvCII with a linker (in this case glycine-serine-serine). This construct removes a short alpha-helix (S717-L727) to minimize the distance between the end of RuvCI and the beginning of RuvCII and allow for a short linker.

[0561] FIG. 1. (A) Design of a split Cas9 protein (heterodimeric Cas9 complex, Cas9 heterodimer). To generate the nuclease lobe, RuvCI was connected to RuvCII (and therefore to the polypeptide RuvCII: HNH domain: RuvCIII: C-terminal PAM-interacting domain) by a GSS linker, and a short alpha-helix was removed to minimize the distance between the end of RuvCI and the beginning of RuvCII. The alpha-helical lobe was amino acids 56-714 as depicted. (B) Crystal structure of split Cas9 showing the nuclease lobe (residues 1-57, 729-1368) in blue and the alpha-helical lobe (residues 58-717) in grey, with the sgRNA and DNA substrates colored in orange and red, respectively. The inset shows where new N and C termini were introduced to generate split-Cas9: the short alpha-helix colored red (residues 718-728) was removed, and residues 57 and 729 were connected with a short GGS linker (blue line). The N- and C-terminii of the nuclease lobe are the same as in the full-length Cas9; the new N- and C-terminii of the alpha-helical lobe are shown.

[0562] Split-Cas9 Cleaves dsDNA in Living Cells

[0563] The individual lobes (alpha-helical lobe and nuclease lobe) of Split-Cas9 were overexpressed in and purified from Escherichia coli using similar protocols as used for full-length Spy Cas9. Both lobes were expressed and purified well (FIG. 2). The lobes were tested alone and together and were compared to WT Cas9 (full length, “FL Cas9”) for their ability to cleave a double-stranded DNA with a target sequence complementary to the single guide RNA (sgRNA). The lobes in isolation showed no detectable DNA cleavage activity over the course of an hour, while the reconstituted Split-Cas9 complex exhibited site-specific cleavage matching that of full-length Cas9, with an approximately 10-fold reduced rate of cleavage (FIG. 2).

[0564] FIG. 2. Expression and cleavage activity of Split-Cas9. 10×-His-MBP-tagged alpha-helical lobe and nuclease lobe were expressed individually in E. coli BL21 and purified. Cleavage assays were performed with about 1 nM 5′ ³²P-labeled double stranded DNA. Protein-guide RNA complexes (RNPs) were preformed by a 10-minute incubation at 37° C. The final concentration of guide NRA was 100 nM in all conditions. Full-length Spy Cas9 was used at 100 nM. 200 nM alpha-helical lobe was used for both “alpha-helical” and “Split-Cas9”. 100 nM nuclease lobe was used for both “nuclease” and “Split-Cas9.” Time points were taken at 0, 1, 2, 5, and 30 minutes and immediately quenched with formamide-EDTA buffer. Quenched samples were resolved with 10% urea-polyacrylamide gel electrophoresis (PAGE) and visualized using a phosphorimager.

[0565] sgRNA Induces Split-Cas9 Heterodimerization

[0566] A hypothesis was made that sgRNA serves to recruit the lobes of split Cas9 into an active complex. Negative stain electron microscopy of a mixture of the lobes in the absence of sgRNA gave particles that appeared to be isolated lobes and no formed complex, suggesting that the lobes are not capable of dimerizing on their own. The addition of sgRNA yielded particles with class averages that closely resembled those of full-length Cas9 with sgRNA bound. 3-dimensional reconstruction confirmed that in the presence of sgRNA Split-Cas9 takes on a conformation similar to that of full-length Cas9. The necessity of sgRNA for dimerization was confirmed with analytical size-exclusion chromatography and Förster resonance energy transfer (FRET) with Cy3 and Cy5-labeled lobes. The affinity of the lobes for sgRNA was examined with filter-binding assays (see example 2 below, FIG. 11). Full-length Cas9 has extremely high affinity for sgRNA, binding with a about10 pM K_{D}. Both lobes also have high affinity for sgRNA on their own: the alpha-helical lobe has a K_{D} of about 2 nM, and the nuclease lobe has a K_{D} of about 0.5 nM. These high-affinity interactions are consistent with the ability of the sgRNA to efficiently recruit the lobes into an active complex.

[0567] 3′-Truncated sgRNAs do not Activate Split-Cas9 for Cleavage

[0568] The two 3′ hairpins (stem loop 2 and stem loop 3) of sgRNA are not required for Cas9 DNA-cleavage activity in living cells or outside of cell in vitro, but they contribute to the RNA's interaction with the nuclease lobe. Truncating these hairpins (i.e., truncating the guide RNA such that it did not include stem loops 2 or 3) reduced the affinity of the nuclease lobe for sgRNA and eliminated the ability of the sgRNA to productively dimerize the two lobes (FIG. 3). For example, sgRNAs missing the final hairpin (stem loop 3, nucleotides 103-124) and both 3′ hairpins (stem loops 2 and 3, nucleotides 85-124) were generated and tested for their ability to guide Split-Cas9 dsDNA cleavage in vitro. Removal of the final hairpin severely reduced DNA cleavage by Split-Cas9, while removal of both hairpins led to no detectable cleavage activity. Full-length Cas9 was not significantly affected by either truncation. If these sgRNA truncations are unable to induce dimerization of Split-Cas9 but are still able to activate sequence-specific cleavage activity of the two lobes when the lobes are linked in the context of full-length Cas9, then truncated sgRNAs can be used in conjunction with dimerization pairs (e.g., small molecule-inducible dimerization pairs) on the two lobes to allow for temporal control over the activation of Split-Cas9.

[0569] FIG. 3. DNA cleavage with truncated single guide RNA. Cleavage assays were performed as described above. The truncated single guide RNA (missing stem loops 2 and 3 as well as the poly-U termination sequence) was used. Note that little to no cleavage was observed when using the truncated single guide RNA with split Cas9 (the alpha-helical lobe plus the nuclease lobe), but efficient cleavage was observed when using full-length single guide RNA (including stem loops 2 and 3) with split Cas9. Also note that when using WT Cas9 (full-length), full-length and truncated sgRNA both efficiently cleaved target nucleic acid.

[0570] Materials and Methods

[0571] Protein purification. The sequence encoding the alpha-helical lobe was polymerase chain reaction (PCR) amplified from a Spy Cas9 expression vector and restriction cloned into a pET-based expression vector to generate a fusion with an N-terminal decahistidine-mannose binding protein (His₁₀-MBP) tag followed by a tobacco etch virus (TEV) protease cleavage site. The nuclease lobe was generated by around-the-horn PCR of a Spy Cas9 expression vector, resulting in a fusion with an N-terminal His₁₀-maltose binding protein (MBP) tag followed by a tobacco etch virus (TEV) protease cleavage site. The protein was expressed and purified as previously described for full-length His₆-MBP tagged Spy Cas9, with the exception that the nuclease lobe was not subjected to ion exchange chromatography.

[0572] Cleavage assays. Cas9-sgRNA (single guide RNA), alpha-helical lobe-sgRNA, nuclease lobe-sgRNA, and Split-Cas9-sgRNA complexes were reconstituted before cleavage experiments by incubating for 10 min at 37° C. in reaction buffer (20 mM Tris-HCl, pH 7.5, 75 mM KCl, 5 mM MgCl2, 1 mM dithiothreitol (DTT), 5% glycerol). Cleavage reactions were conducted at room temperature and contained ˜1 nM 5′-radiolabeled 55 bp DNA containing a target sequence and a PAM site and 100 nM of the appropriate protein-sgRNA complex, with the exception of the alpha-helical lobe, which was maintained at 200 nM for both its reactions alone and when part of the Split-Cas9 complex. Aliquots were removed at each time point and quenched by the addition of RNA gel-loading buffer (95% deionized formamide, 0.025% (w/v) bromophenol blue, 0.025% (w/v) xylene cyanol, 50 mM EDTA (pH 8.0), 0.025% (w/v) sodium dodecyl sulfate (SDS)). Samples were boiled for 10 min at 95° C. before being resolved by 10% denaturing PAGE. Reaction products were visualized by phosphorimaging and quantified with ImageQuant (GE Healthcare).

[0573] DNA and sgRNA binding assays. Electromobility shift assays were performed by incubating ˜0.2 nM 5′-radiolabeled target DNA with increasing concentrations of full-length Cas9, alpha-helical lobe, nuclease lobe, and both lobes in a one-to-one ratio, with sgRNA held in excess of the maximum protein concentration (500 nM for full-length Cas9 and 5 μM for the lobes and Split-Cas9). Binding reactions were incubated at room temperature for one hour in a reaction buffer containing 20 mM Tris, pH 7.5, 100 mM KCl, 5 mM MgCl₂, 1 mM DTT, 5% glycerol, 0.01% Tween-20, 100 μg/mL bovine serum albumin (BSA), and 50 μg/mL heparin and resolved with 10% native PAGE with 5 mM MgCl₂ at 4° C. Reaction products were visualized by phosphorimaging and quantified with ImageQuant.

[0574] Filter-binding assays were performed by incubating ˜0.02 nM 5′radiolabeled sgRNA with increasing concentrations of full-length Cas9, alpha-helical lobe, nuclease lobe, and both lobes in a one-to-one ratio at room temperature for one hour in a reaction buffer containing 20 mM Tris, pH 7.5, 100 mM KCl, 5 mM MgCl₂, 1 mM DTT, 5% glycerol, 0.01% Igepal, 10 μg/mL yeast tRNA, and 50 μg/mL BSA. Samples were drawn through a dot blot with HT Tuffryn polysulfone membrane, Protran nitrocellulose membrane, and Hybond N+ nylon membrane. The membranes were visualized by phophorimaging and quantified with ImageQuant.

[0575] FIG. 4. (A) Two different views of the crystal structure of Cas9. The red positions (N-terminus of the nuclease lobe) and the green positions (C-terminus of the alpha helical lobe) represent the insertion sites (e.g., for a dimerization pair) for nuclease lobe circular permutant 1. [Nuclease lobe (blue): Red=Nuclease lobe N-terminal insertion site (e.g., Dimerization Domain: Linker: Cas9 amino acids 718-1368: 20-30 residue linker : Cas9 amino acids 1-56). Purple=Nuclease lobe C-terminus] [Alpha helical lobe (gray): Green=Alpha helical lobe C-terminal insertion site (e.g., Cas9 amino acids 56-717: Linker: Dimerization Domain). Yellow=Alpha helical lobe N-terminus]. (B) Two different views of the crystal structure of Cas9. The red positions (beginning and end of loop of nuclease lobe) and the green position (C-terminus of the alpha helical lobe) represent the insertion sites (e.g., for a dimerization pair: one red position and the green position) for nuclease lobe circular permutant 5. [Nuclease lobe (blue): Red=Nuclease lobe Beginning and end of loop insertion sites (e.g., Cas9 amino acids 1016-1368: 20-30 residue linker: Cas9 amino acids 1-57: GSS linker: Cas9 amino acids 728-1015: linker: Dimerization Domain) (or e.g., Dimerization Domain: linker: Cas9 amino acids 1016-1368: 20-30 residue linker: Cas9 amino acids 1-57: GSS linker: Cas9 amino acids 728-1015)] [Alpha helical lobe (gray): Green=Alpha helical lobe C-terminal insertion site (e.g., Cas9 amino acids 56-717: Linker: Dimerization Domain) Yellow=Alpha helical lobe N-terminus]. While the exact amino acid positions above are suitable, the exact positions are not necessarily required, as long as the functional part of each region is maintained. As an illustrative example, when “Cas9 amino acids 1-57” is recited above, a region having amino acids 3-57, 5-57, 1-55, or 3-55, etc. can also be suitable.

### Example 2

[0576] Cas9, an RNA-guided DNA endonuclease found in clustered regularly interspaced short palindromic repeats (CRISPR) bacterial immune systems, is a versatile tool for genome editing, transcriptional regulation and cellular imaging applications. Structures of Streptococcus pyogenes Cas9 alone or bound to single-guide RNA (sgRNA) and target DNA revealed a bi-lobed protein architecture that undergoes major conformational changes upon guide RNA and DNA binding. To investigate the molecular determinants and relevance of the inter-lobe rearrangement for target recognition and cleavage, a split Cas9 enzyme was designed in which the nuclease lobe and α-helical lobe are expressed as separate polypeptides. Although the lobes do not interact on their own, the sgRNA recruited them into a ternary complex that recapitulates the activity of full-length Cas9 and catalyzes site-specific DNA cleavage. The use of a modified sgRNA abrogated split-Cas9 activity by preventing dimerization, allowing for the development of an inducible dimerization system. Split-Cas9 can act as a highly regulatable platform for genome engineering applications.

[0577] The following experiments show that two distinct Cas9 polypeptides encompassing the α-helical and nuclease lobes can be stably expressed and purified. Filter binding and negative-stain EM experiments demonstrated that the split-Cas9 assembles with sgRNA into a ternary complex resembling that of full-length Cas9-RNA. Furthermore, DNA cleavage assays revealed that the enzymatic activity of split-Cas9 closely mimics that of wild-type (WT) Cas9. Split-Cas9 is functional for genome editing in human cells with full-length sgRNAs, but can be inactivated with shortened sgRNAs that give rise to destabilized complexes. Together these data show how the Cas9 protein can be re-engineered as a split enzyme whose assembly and function is regulatable by the sgRNA, providing a new platform for controlled use of Cas9 for genome engineering applications in cells.

[0578] Materials And Methods

[0579] Cloning and protein purification. The expression vector for purification of the nuclease lobe was generated by Around the Horn (ATH) polymerase chain reaction (PCR) using a pre-existing pET-based expression vector for S. pyogenes Cas9. The final construct encodes an N-terminal decahistidine-maltose binding protein (His₁₀-MBP) tag, a tobacco etch virus (TEV) protease cleavage site, residues 1-57, a glycine-serine-serine linker, and residues 729-1368. The vector for the catalytically inactive dNuclease lobe was generated by ATH PCR of a similar dCas9 (D10A/H840A) vector. The vector for expression of the α-helical lobe was generated by PCR amplification of S. pyogenes Cas9 residues 56-714 and assembly of the resulting fragment into a His₁₀-MBP expression vector via ligation-independent cloning.

[0580] Each protein was over-expressed in E. coli BL21 Rosetta 2(DE3) (EMD Biosciences) by growing in 2×YT medium at 37° C. to an optical density of 0.5, inducing with 0.5 mM IPTG, and growing an additional 16 hours at 18° C. Cells were lysed by sonication in a buffer containing 50 mM Tris pH 7.5, 500 mM NaCl, 1 mM TCEP, 5% glycerol, and a protease inhibitor cocktail (Roche). The clarified lysate was bound in batch to Ni-NTA agarose (Qiagen). The resin was washed extensively with 20 mM Tris pH 7.5, 500 mM NaCl, 1 mM TCEP, 10 mM imidazole, 5% glycerol; and the bound protein was eluted in 20 mM Tris pH 7.5, 500 mM NaCl, 1 mM TCEP, 300 mM imidazole, 5% glycerol. The His₁₀-MBP affinity tag was removed with His₆-tagged TEV protease during overnight dialysis against 20 mM Tris pH 7.5, 500 mM NaCl, 1 mM TCEP, 5% glycerol. The protein was then flowed over Ni-NTA agarose to remove TEV protease and the cleaved affinity tag.

[0581] The α-helical lobe was dialyzed for 2 h against 20 mM Tris pH 7.5, 125 mM KCl, 1 mM TCEP, 5% glycerol, and purified on a 5 mL HiTrap SP Sepharose column (GE Healthcare), with elution over a linear gradient from 125 mM-1 M KCl. The α-helical lobe was further purified by size exclusion chromatography on a Superdex 200 16/60 column (GE Healthcare) in 20 mM Tris pH 7.5, 200 mM KCl, 1 mM TCEP, 5% glycerol. The nuclease lobe was purified via size exclusion chromatography immediately following the ortho-Ni-NTA step. The dNuclease lobe was purified as described for the nuclease lobe, except the size exclusion chromatography was performed with 20 mM Tris pH 7.5, 500 mM KCl, 1 mM TCEP, 5% glycerol. Full-length Cas9 was purified as previously described (8).

[0582] In vitro transcription of sgRNA. Linearized plasmid DNA was used as a template for in vitro transcription of full-length, Δhairpins1-2, and Δhairpin2 λ1 sgRNA. The appropriate region of the sgRNA, along with a T7 RNA polymerase promoter sequence, was PCR-amplified and restriction-cloned into EcoRI/BamHI sites of a pUC19 vector, and the resulting vector was digested with BamHI to enable run-off transcription. The Δhairpin1 and Δspacer-nexus λ1 sgRNA, as well as λ1 crRNA and tracrRNA, were transcribed from a single-stranded DNA template with an annealed T7 promoter oligonucleotide. The DNA template for EMX1 sgRNA was produced by overlapping PCR as previously described (13).

[0583] Transcription reactions (1 mL) were conducted in buffer containing 50 mM Tris, pH 8.1, 25 mM MgCl₂, 0.01% Triton X-100, 2 mM spermidine, and 10 mM DTT, along with 5 mM each of ATP, GTP, CTP, and UTP, 100 μg/mL T7 polymerase, and approximately 1 μM DNA template. Reactions were incubated at 37° C. overnight and subsequently treated with 5 units DNase (Promega) for 1 hour. Reactions were then quenched with 800 μL of 95% formamide, 0.05% bromophenol blue, and 20 mM EDTA, and loaded onto a 7M urea 10% polyacrylamide gel. The appropriate band was excised, and the RNA was eluted from the gel overnight in DEPC-treated water. The sgRNA was ethanol-precipitated and resuspended in DEPC-treated water. Concentrations were determined by A_{260 nm} using a NanoDrop (Thermo Scientific). For filter binding assays, the sgRNA was dephosphorylated with calf intestinal phosphatase (New England Biolabs) prior to radiolabeling with T4 polynucleotide kinase (New England Biolabs) and γ-[³²P]-ATP (Perkin Elmer). The radiolabeled sgRNA was gel purified as described above.

[0584] Split-Cas9 complex reconstitution. Split-Cas9 complexes were reconstituted prior to cleavage and binding assays at 37° C. for 10 minutes in a buffer containing 20 mM Tris pH 7.5, 100 mM KCl, 5 mM MgCl₂, 1 mM DTT, and 5% glycerol. For binding assays, reactions containing equimolar amounts of the dNuclease lobe, the α-helical lobe, and in vitro transcribed sgRNA. For cleavage assays, reactions contained equimolar amounts of the nuclease lobe and sgRNA (or crRNA:tracrRNA),with a two-fold molar excess of the α-helical lobe.

[0585] DNA cleavage assays. All cleavage assays were performed in 1× Cleavage Buffer, which contained 20 mM Tris pH 7.5, 100 mM KCl, 5 mM MgCl₂, 1 mM DTT, and 5% glycerol. Preformed complexes were diluted in Cleavage Buffer, and reactions were initiated with the addition of radiolabeled dsDNA substrates. Final reaction concentrations were 100 nM protein:RNA complex and ˜1 nM radiolabeled DNA target. The concentration of Cas9 was chosen to be sufficiently above the K_{d} for the sgRNA such that complex assembly is unlikely to be rate-limiting, except in the case of split-Cas9 and the Δhairpins1-2 sgRNA (K_{d}>100 nM). Reactions proceeded at room temperature, and aliquots were removed at selected time points and quenched with an equal volume of buffer containing 50 mM EDTA, 0.02% bromophenol blue, and 90% formamide Reaction products were resolved by 7M urea-PAGE, gels were dried, and DNA was visualized by phosphorimaging and quantified using ImageQuant software (GE Healthcare). The percentage of DNA cleaved was determined by dividing the amount of cleaved DNA by the sum of uncleaved and cleaved DNA. Kinetic analysis was performed using Prism (GraphPad Software). Reported observed rate constants (k_{obs}) are the average of three independent experiments±standard error of the mean. Graphed values are the averaged timepoints of three independent experiments with error bars representing the standard deviation.

[0586] Electrophoretic mobility shift assays (EMSAs). All binding assays were performed in 1× Binding Buffer, which contains 20 mM Tris pH 7.5, 100 mM KCl, 5 mM MgCl₂, 1 mM DTT, 5% glycerol, 50 μg/mL heparin, 0.01% Tween-20, 100 μg/mL BSA. Preformed complexes were diluted into 1× Binding Buffer, after which radiolabeled dsDNA substrates were added to a final concentration of <0.2 nM. Reactions were incubated at room temperature for 60 min and then resolved at 4° C. on a native 8% polyacrylamide gel containing 0.5× TBE and 5 mM MgCl₂. Gels were dried and DNA was visualized by phosphorimaging and quantified using ImageQuant software (GE Healthcare). The fraction of DNA bound (amount of bound DNA divided by the sum of free and bound DNA) was plotted versus concentration of protein and fit to a binding isotherm using Prism (GraphPad Software).

[0587] Filter-binding assays. All filter-binding assays were performed in 1× RNA Binding Buffer, which contains 20 mM Tris pH7.5, 100 mM KCl, 5 mM MgCl₂, 1 mM DTT, 5% glycerol, 0.01% Igepal CA-630, 10 μg/mL yeast tRNA, and 10 μg/mL BSA. WT Cas9, α-helical lobe, nuclease lobe, or an equimolar mix of both lobes (split-Cas9) were incubated with <0.02 nM radiolabeled sgRNA for 60 min at room temperature. Tufryn (Pall Corporation), Protran (Whatman), and Hybond-N+ (GE Healthcare) membranes were soaked in buffer containing 20 mM Tris pH7.5, 100 mM KCl, 5 mM MgCl₂, 1 mM DTT, 5% glycerol, and arranged on a dot blot apparatus. Binding reactions were separated through the membranes by the application of vacuum, and after drying, the membranes were visualized by phosphorimaging and quantified using ImageQuant Software (GE Healthcare). The fraction of sgRNA bound was plotted versus the concentration of protein and fit to a binding isotherm using Prism (GraphPad Software). Reported K_{d} values are the average of three independent experiments, and errors represent the standard error of the mean.

[0588] Negative-stain electron microscopy and image processing. Negatively-stained samples of the α-helical lobe, nuclease lobe, and split-Cas9 (α-helical lobe and nuclease lobe) were prepared and imaged with and without sgRNA as described previously (4). Data were acquired using a Tecnai F20 Twin transmission electron microscope operated at 120 keV at a nominal magnification of 80,000× (1.45 Å at the specimen level) using low-dose exposures (˜20 e⁻Å⁻²) with a randomly set defocus ranging from −0.7 to −1.6 μm. A total of 150-200 images of each Cas9 sample was automatically recorded on a Gatan 4 k×4 k CCD camera using the MSI-Raster application within LEGINON (22). Low-resolution negative stain class averages of Lid particles from the yeast 26S proteasome (23) were used as references for template-based particle picking. The Lid complex was used as a template to avoid selection bias because it bears minimal to no structural resemblance to Cas9. Cas9 complexes were extracted using a 224×224-pixel box size. These particles were subjected to 2D reference-free alignment and classification using multivariate statistical analysis and multi-reference alignment in IMAGIC (24).

[0589] Cas9 and split-Cas9 RNP assembly and nucleofection. The split-Cas9 RNP was prepared immediately before the experiment by incubating both lobes with sgRNA at molar ratios of 1.2:1:1.2 (α-helical lobe:nuclease lobe:sgRNA) for 10 min at 37° C. in 20 mM HEPES pH 7.5, 150 mM KCl, 1 mM MgCl₂, 10% glycerol, and 1 mM TCEP. The nucleofections were carried out as previously described for Cas9, using 10, 30, and 100 pmol of RNP complex for approximately 2×10⁵ cells (13). Where indicated, cells were synchronized with 200 ng/mL nocodazole for 17 hr prior to nucleofection. Neither WT Cas9 nor the split-Cas9 lobes had nuclear localization signals, which may have led to reduced editing levels, particularly for the unsynchronized cells.

[0590] Analysis of in-cell genome editing efficiency. Determination of the percentage of indels induced at the target region was performed as previously described (13). In brief, 640-nt regions of the EMX1 locus containing the target sites were PCR amplified, and the resulting products were denatured, re-annealed, and digested with T7 endonuclease I (New England Biolabs), which cleaves mismatched heteroduplex DNA (25). The products were resolved on a 2% agarose gel containing SYBR Gold (Life Technologies), and band intensities were determined using Image Lab (Bio-Rad Laboratories). Editing efficiencies was determined using the formula (1−(1−(b+c/a+b+c))1/2)×100, where “a” is the band intensity of DNA substrate and “b” and “c” are the cleavage products (26).

[0591] Results

[0592] Design and Functional Validation of Split-Cas9

[0593] The nuclease lobe of Cas9 includes the RuvC and HNH nuclease domains, as well as a C-terminal domain that is involved in PAM recognition (FIG. 10A) (8-10). The RuvC domain comprises three distinct motifs: motifs II and III are interrupted by the HNH domain, and motifs I and II are interrupted by a large lobe composed entirely of α-helices. This α-helical lobe, also referred to as the recognition (REC) lobe (9), forms a broad cleft that makes extensive contacts with the sgRNA and target DNA.

[0594] Using available crystal structures as a guide, a split-Cas9 was designed in which the native structure of both lobes was kept as intact as possible (FIG. 10A). In particular, rather than simply split the full-length Cas9 sequence internally at a single junction, the nuclease lobe was constructed by directly linking the N-terminal RuvCI motif to the remainder of the nuclease lobe located ˜650 amino acids away in primary sequence, with the intervening polypeptide comprising the α-helical lobe. Two crossover points between the lobes occur at residues ˜56 and ˜720 (FIG. 10B): the C-terminal connection is disordered in both apo-Cas9 and sgRNA/DNA-bound structures, and the N-terminal connection occurs between the RuvCI motif and the bridge helix. Residue E57 from RuvCI was connected with residue G729 from RuvCII using a three-amino acid linker, and removed a short, poorly conserved α-helix from the RuvCII motif that does not appear to play an important structural role in the sgRNA/DNA-bound state (FIG. 10B). The α-helical lobe spans residues G56-S714, with the N-terminus encompassing the entirety of the bridge helix.

[0595] To determine whether the lobes could function as separate polypeptides, both lobes in Escherichia coli were separately over-expressed and purified by affinity and size-exclusion chromatography (FIG. 10C and FIG. 13). Whether split-Cas9 (α-helical lobe plus nuclease lobe) would recapitulate the activity of WT Cas9 was investigated using a standard cleavage assay with sgRNA and a radiolabeled double-stranded DNA (dsDNA) target (FIG. 10D). No cleavage was observed with either lobe individually, but the reconstituted split-Cas9 enzyme complex exhibited robust target DNA cleavage (FIG. 10D and FIG. 14). Split-Cas9 maintained the same site and pattern of cleavage as WT Cas9, including the “trimming” of the non-target strand observed previously (4), and functioned equally well with a dual guide RNA composed of crRNA and tracrRNA (FIG. 14). In addition, split-Cas9 activity was dependent on complementarity between the sgRNA and target DNA as well as the presence of a 5′-NGG-3′ PAM (FIG. 14).

[0596] FIG. 10. Cas9 can be split into two separate polypeptides that retain the ability to catalyze RNA-guided dsDNA cleavage. (A) Domain organization of WT Cas9 (top) and split-Cas9 (bottom), composed of the α-helical lobe and nuclease lobe. Domain junctions are numbered according to Nishimasu et al. (9). B H, bridge helix; REC, recognition lobe; PI, PAM-interacting. The PI domain can be further subdivided into Topo-homology and C-terminal domains (8). (B) Crystal structures of sgRNA/DNA-bound Cas9 (PDB ID: 4008) (9) colored according to domain (left) or by lobe (right), with the α-helical and nuclease lobes depicted in grey and blue, respectively. Nucleic acids are omitted for clarity. In the observed interface between the lobes (inset, left), the dashed line represents a disordered linker spanning residues V713-D718. In the engineered interface (inset, right), the dashed line represents a GGS linker connecting E57 to G729, and new N- and C-termini of the α-helical lobe are shown. (C) Sodium dodecyl sulfate polyacrylamide gel electrophoresis (SDS-PAGE) analysis of purified WT Cas9 (159 kDa), the α-helical lobe (77 kDa), and the nuclease lobe (81 kDa). The gel was stained with Coomassie Brilliant Blue. (D) DNA cleavage assay with the indicated Cas9 construct, analyzed by denaturing PAGE. Reactions contained ˜1 nM radiolabeled dsDNA and 100 nM protein-sgRNA complex; split-Cas9 contained a two-fold molar excess of the α-helical lobe. Quantified data and kinetic analysis can be found in FIG. 14 and Table S1.

[0597] FIG. 13. Size exclusion chromatograms of purified α-helical (top) and nuclease (bottom) lobes. Following cleavage of the affinity tag by TEV protease and further clean-up using ortho-Ni-NTA and ion exchange columns (α-helical lobe) or an ortho-Ni-NTA column alone (nuclease lobe), the polypeptides were concentrated and injected onto a HiLoad 16/60 Superdex 200 gel filtration column. The α-helical (77 kDa) and nuclease lobes (81 kDa) eluted at 88.4 mL and 76.8 mL, respectively. Both polypeptides were soluble and exhibited consistent activity across multiple rounds of freeze-thawing.

[0598] FIG. 14. Split-Cas9 activity is mediated by single-guide and dual-guide RNAs, and requires RNA:DNA complementarity and a PAM. (A) DNA cleavage time courses using a single-guide RNA and WT Cas9, individual α-helical and nuclease lobes, or split-Cas9. Values for WT and split-Cas9 were averaged from three independent experiments, and error bars represent the standard deviation. Rate constants can be found in FIG. 20B (Table S1). (B) DNA cleavage time courses using a dual-guide RNA (crRNA:tracrRNA hybrid) and WT Cas9 or split-Cas9. Data are presented as in A. (C) DNA cleavage assay with split-Cas9 and DNA substrates containing a mismatched target or mutated PAM, analyzed by denaturing PAGE. Reactions contained ˜1 nM radiolabeled dsDNA and 100 nM Cas9-sgRNA complex.

[0599] When the kinetics of DNA cleavage under pseudo-first order conditions was investigated using excess enzyme, split-Cas9 was ˜10-fold slower than WT, though it reached the same endpoint after 5 minutes (FIG. 14 and FIG. 20B (Table S1)). This may result from slower kinetics of protein-RNA complex formation, a reduced rate of dsDNA recognition and unwinding, or a minor defect in nuclease domain activation. DNA binding experiments using nuclease-inactive split-dCas9 (D10A/H840A mutations) revealed a significantly weaker affinity of split-Cas9 for target DNA than WT Cas9 (FIG. 15), suggesting that slower kinetics of dsDNA binding likely limit the observed rate of cleavage. Collectively, these results demonstrate that the enzymatic activity of WT Cas9 does not require a direct linkage between the α-helical and nuclease lobes, though their physical connection within RNA-protein complexes increases the affinity for the target DNA substrate. Remarkably, while previous work shows that the RNA-induced large-scale rearrangement of both lobes is necessary for WT Cas9 to achieve an active conformation (8), the experiments reveal that the sgRNA is entirely sufficient to recruit and dimerize the separate lobes into an active enzyme complex. Furthermore, communication through the sgRNA enables PAM recognition, dsDNA unwinding, and DNA cleavage, despite the absence of extensive protein-protein interactions between the lobes.

[0600] FIG. 15. Split-Cas9 exhibits substantially weaker binding affinity for target DNA than WT Cas9. (A) Radiolabeled target dsDNA was incubated with increasing concentrations of Cas9-sgRNA complexes using catalytically inactive mutants of WT Cas9 and the nuclease lobe, and reaction products were resolved by native PAGE. The distinct Cas9 constructs in each titration are indicated (top). (B) Quantified binding data from A. Split-dCas9-RNA binds dsDNA with an apparent equilibrium dissociation constant of ˜700 nM, which is more than 3 orders of magnitude greater than that determined for dCas9-RNA (K_{d}≈0.2 nM). However, the apparent affinity measured here is likely to be much weaker than the actual affinity, since the low split-dCas9-sgRNA concentrations that were tested will also favor dissociation of the ternary complex formed between the sgRNA, α-helical lobe, and nuclease lobe. Thus, the observed binding curve is likely a convolution of equilibria between the protein and sgRNA, and between the protein-sgRNA complex and dsDNA. Individual lobes together with sgRNA do not appreciably bind dsDNA at the tested concentrations.

[0601] sgRNA Motifs Recruit both Cas9 Lobes to form a Ternary Complex

[0602] RNA molecular determinants that promote heterodimerization of the α-helical and nuclease lobes was next investigated. Crystal structures of sgRNA/DNA-bound Cas9 show that the spacer (guide) and stem-loop motifs at the 5′ end of the sgRNA primarily contact the α-helical lobe, whereas two hairpins at the 3′ end bind the outside face of the nuclease lobe (FIG. 11A). The nexus motif, recently shown to be critical for activity (11), occupies a central position between the lobes and forms extensive interactions with the bridge helix. Based on this interaction profile, a full-length sgRNA and two shorter sgRNA constructs that were selectively truncated from either the 5′ or 3′ end were generated (FIG. 11B), and their affinities were determined for binding to WT Cas9, the individual α-helical and nuclease lobes, and split-Cas9 using a filter binding assay.

[0603] The full-length sgRNA is bound by WT Cas9 with an equilibrium dissociation constant (K_{d}) of 10±2 pM, whereas the lobes individually and together have K_{d} values in the range of 0.2-0.8 nM (FIG. 11C and FIG. 20A (Table 1)). The difference between WT and split-Cas9 likely reflects the increased entropic cost required to assemble a ternary versus binary complex. Interestingly, WT Cas9 bound a truncated sgRNA comprising only the 3′ hairpins (Δspacer-nexus) with an affinity that was indistinguishable from the full-length sgRNA (FIG. 11D and FIG. 20A (Table 1)), indicating that these hairpins provide the major source of binding energy for the WT protein-RNA complex. Consistent with the crystal structure, the nuclease lobe still bound the 5′-truncated sgRNA as tightly as the full-length sgRNA, while the affinity of the α-helical lobe was reduced by over three orders of magnitude (K_{d}>100 nM).

[0604] It was then hypothesized that removing the two hairpins from the 3′ end of the sgRNA (Δhairpins1-2) would selectively perturb interactions with the nuclease lobe. Indeed, the affinity of the 3′-truncated sgRNA for the nuclease lobe decreased by over three orders of magnitude relative to full-length sgRNA (K_{d}>100 nM), whereas the affinity of the α-helical lobe was unchanged (FIG. 11D and FIG. 20A (Table 1)). The results demonstrate that sgRNA truncations specifically destabilize binding to only one of the two lobes, and that the affinity of split-Cas9 is limited by the highest affinity interaction with either lobe. These findings highlight the multiple, independent molecular contacts formed between the sgRNA and the two lobes of Cas9.

[0605] Based on the binding data and on the minimal contacts observed between the two Cas9 lobes in available structures, it was then hypothesized that the sgRNA would be required for heterodimerization of the α-helical and nuclease lobes. To test this, analytical negative-stain electron microscopy was performed with each lobe alone and together in the presence and absence of sgRNA. Raw micrographs of a sample containing both polypeptides and the sgRNA revealed bi-lobed densities that had dimensions consistent with earlier reconstructions of the Cas9-RNA complex (FIG. 16) (8), and the resulting class averages were indistinguishable from those obtained using WT Cas9 (FIG. 11E). In contrast, smaller particles that had dimensions more consistent with single lobes were observed when the polypeptides were mixed together in the absence of sgRNA (FIG. 11E and FIG. 16). These results indicate that a full-length sgRNA acts as a molecular scaffold in dimerizing the two lobes.

[0606] FIG. 11. Split-Cas9 assembly requires the sgRNA. (A) Crystal structure of sgRNA/DNA-bound Cas9 (PDB ID: 4008) (9): Cas9 is colored by lobe and shown as a transparent surface, the sgRNA is colored by motif according to Briner et al. (11), and the DNA is omitted for clarity. (B) Cartoon representations of full-length and truncated sgRNA variants used in binding experiments; specific motifs of the sgRNA are colored as in (A). (C-D) Results from binding experiments using full-length sgRNA (C), and Δhairpins1-2 and Δspacer-nexus sgRNA truncations (D). Radiolabeled RNAs were incubated with increasing concentrations of WT Cas9, individual α-helical and nuclease lobes, or split-Cas9, and the fraction of protein-bound RNA was determined by nitrocellulose filter binding. Equilibrium dissociation constants (K_{d}) determined from three independent experiments are shown in FIG. 20A (Table 1). (E) Reference-free class averages from negative-stain EM images of split-Cas9 reconstituted with single-guide RNA (top left), WT Cas9 reconstituted with dual-guide RNA (top right), and split-Cas9 in the absence of guide RNA (bottom). For split-Cas9 without sgRNA, several class averages are shown. The width of the boxes corresponds to ˜336 Å. Data with WT Cas9 is adapted from Jinek et al. (8).

[0607] FIG. 16. Split-Cas9 heterodimerization requires the sgRNA. (A-D) Raw electron micrographs of negatively-stained α-helical and nuclease lobes alone (A,B), together (C), or together with sgRNA (D). Particles having dimensions consistent with WT Cas9-RNA complexes, and thus indicative of heterodimer formation, are only observed in the presence of sgRNA. Representative particles are circled (yellow), and the scale bar indicates 50 nm.

[0608] Split-Cas9 Functions in Mammalian Cells for Genome Editing

[0609] To determine whether split-Cas9 would retain the ability to generate site-specific genomic edits in vivo, the EMX1 locus was targeted in HEK293T cells by nucleofection using reconstituted Cas9-sgRNA ribonucleoprotein (RNP) complexes (FIG. 12A) (13). Split-Cas9 generated indels with efficiencies of up to 0.6% and 2% in cells that were unsynchronized or nocodazole synchronized, respectively, compared to 22% and 34% with WT Cas9 (FIG. 12B). The reduced levels of editing may be due in part to disruption of the ternary complex during dilution and nucleofection, as the complex is limited by the affinity of the α-helical lobe for sgRNA, or to slower kinetics of DNA cleavage in cells. Additionally, because each copy of sgRNA must recruit both lobes to form an active complex, the activity in cells may be sensitive to the stoichiometry between the sgRNA and either lobe. In agreement with this, the in vitro DNA cleavage activity of split-Cas9 decreased as the sgRNA concentration was increased above that of both lobes (FIG. 17), suggesting that excess sgRNA can titrate the lobes apart from each other. While the results leave room for optimization of split-Cas9 activity in cells, they demonstrate that the intrinsic genome editing capabilities are retained when Cas9 comprises two individual polypeptides.

[0610] FIG. 12. Genomic editing function and selective inactivation of split-Cas9. (A). Schematic of the split-Cas9 RNP nucleofection assay using a full-length EMX1-targeting sgRNA. Illustration and protocol adapted from Lin et al. (13). (B) Analysis of editing efficiencies by nonhomologous end joining (NHEJ) using a T7 endonuclease I assay and agarose gel electrophoresis. Cells were nucleofected with 100,30, or 10 pmol of WT or split-Cas9 ribonucleoprotein (RNP) complexes after arrest at mitosis with nocodazole (Sync) or during normal growth (Unsync). Editing efficiencies are shown at the bottom. (C) DNA cleavage time courses using WT and split-Cas9 with either a full-length sgRNA (top) or the Δhairpins1-2 sgRNA (bottom). Values were averaged from three independent experiments, and error bars represent the standard deviation. Rate constants can be found in FIG. 20B (Table S1).

[0611] FIG. 17. Excess sgRNA reduces the DNA cleavage activity of split-Cas9. DNA cleavage assay with varying molar ratios of protein to sgRNA, analyzed by denaturing PAGE. Reactions contained ˜1 nM radiolabeled dsDNA, 100 nM α-helical and nuclease lobes, and 50-1000 nM sgRNA. The extent of product formation decreases substantially as the sgRNA concentration surpasses the lobe concentration. This observation suggests that stoichiometric excesses of sgRNA titrate the individual lobes away from each and onto independent sgRNA molecules, a hypothesis supported by the finding that distinct sgRNA motifs interact with either lobe.

[0612] Engineered sgRNAs Selectively Preclude Split-Cas9 but not WT Cas9 Activity

[0613] The potential for enhanced spatiotemporal control of genome engineering events with split-Cas9 prompted the investigation of ways in which sgRNA-mediated dimerization of the α-helical and nuclease lobes could be perturbed. In particular, certain 3′-truncated or modified sgRNAs, which have weak affinity for the nuclease lobe (FIG. 11E) but still support robust DNA cleavage activity of WT Cas9 (4), could selectively inactivate split-Cas9 activity through their inability to effectively recruit and dimerize both lobes into a functional enzyme complex. Thus, the activity of split-Cas9 in cells could be made dependent upon inducible protein-protein dimerization domains (FIG. 18).

[0614] When sgRNA variants that lacked one or both hairpins at the 3′ end were tested for their ability to support in vitro cleavage, split-Cas9 activity was either severely compromised or completely abolished relative to WT Cas9 activity. (FIG. 12C, FIG. 19, and FIG. 20B (Table S1)). A recent report found that sgRNAs in which only the first hairpin is deleted function robustly in cells (11), and similar designs supported DNA cleavage activity of WT Cas9 but not split-Cas9 in vitro (FIG. 19). Thus, rationally designed variants of the sgRNA scaffold can be used to prevent RNA-mediated heterodimerization of the two lobes without compromising the intrinsic RNA-guided DNA cleaving capabilities of Cas9. Split-Cas9 can be converted into a regulatable system using exogenous dimerization domains (FIG. 18). Fusing both lobes to domains that selectively dimerize upon chemical or optical induction, such as the abscisic acid-inducible PYL-ABI dimer (17) or the blue light-inducible CRY2-CIB1 dimer (18) would allow for enhanced spatiotemporal control of genome engineering events. Dimerization domains might also overcome inefficient complex formation by making lobe assembly independent of the sgRNA. The combined use of inducible dimerization domains with compromised sgRNA variants that enable DNA targeting but not split-Cas9 assembly would eliminate leaky activity in the absence of inducer while still allowing for robust activation, creating an extremely sensitive inducible system.

[0615] FIG. 18. Strategy for inducible control of genome engineering by a split-Cas9 enzyme complex. (A) Because the α-helical and nuclease lobes dimerize in the presence of sgRNA, both WT and split-Cas9 are functional genome editing tools in cells using full-length sgRNA. (B) sgRNA variants with 3′-hairpin truncations have substantially weaker affinity for the nuclease lobe and thus do not efficiently assemble a functional split-Cas9 complex, leading to an inactive enzyme. In contrast, in vitro DNA cleavage by WT Cas9 is minimally affected by these truncations, indicating that the intrinsic activity of the Cas9-sgRNA enzyme complex does not require hairpins at the 3′ end. (C) A schematic of an inducible split-Cas9 system, in which exogenous dimerization domains control the assembly of a functional ternary complex between a 3′-truncated sgRNA and the α-helical and nuclease lobes. By fusing both lobes to domains that dimerize only upon some external stimulus (e.g. a small molecule; red trapezoid), split-Cas9 can be specifically activated for a desired genome engineering outcome.

[0616] FIG. 19. 3′-truncated sgRNA variants selectively inactivate split-Cas9. (A-B) DNA cleavage assays with WT and split-Cas9 and a panel of four different sgRNAs, analyzed by denaturing PAGE. (A) Full-length sgRNAs promote DNA cleavage activity of both WT and split-Cas9, whereas split-Cas9 activity is completely lost with an sgRNA lacking both hairpins at the 3′ end (Δhairpins1-2). (B) sgRNA variants where only one hairpin is removed show minimal effects on WT Cas9 activity but severely (Δhairpin2) or completely (Δhairpin1) inactivate split-Cas9.

### REFERENCES

[0617] 1. Barrangou R, Marraffini L A (2014) CRISPR-Cas systems: Prokaryotes upgrade to adaptive immunity Mol Cell 54:234-244.
[0618] 2. van der Oost J, Westra E R, Jackson R N, Wiedenheft B (2014) Unravelling the structural and mechanistic basis of CRISPR-Cas systems. Nat Rev Microbiol 12:479-492.
[0619] 3. Sapranauskas R et al. (2011) The Streptococcus thermophilus CRISPR/Cas system provides immunity in Escherichia coli. Nucleic Acids Res 39:9275-9282.
[0620] 4. Jinek M et al. (2012) A programmable dual-RNA-guided DNA endonuclease in adaptive bacterial immunity. Science 337:816-821.
[0621] 5. Mali P, Esvelt K M, Church G M (2013) Cas9 as a versatile tool for engineering biology. Nat Meth 10:957-963.
[0622] 6. Hsu P D, Lander E S, Zhang F (2014) Development and applications of CRISPR-Cas9 for genome engineering. Cell 157:1262-1278.
[0623] 7. Doudna J A, Charpentier E (2014) Genome editing. The new frontier of genome engineering with CRISPR-Cas9. Science 346:1258096.
[0624] 8. Jinek M et al. (2014) Structures of Cas9 endonucleases reveal RNA-mediated conformational activation. Science 343:1247997.
[0625] 9. Nishimasu H et al. (2014) Crystal structure of cas9 in complex with guide RNA and target DNA. Cell 156:935-949.
[0626] 10. Anders C, Niewoehner O, Duerst A, Jinek M (2014) Structural basis of PAM-dependent target DNA recognition by the Cas9 endonuclease. Nature 513:569-573.
[0627] 11. Briner A E et al. (2014) Guide RNA functional modules direct cas9 activity and orthogonality. Mol Cell 56:333-339.
[0628] 12. Hsu P D et al. (2013) DNA targeting specificity of RNA-guided Cas9 nucleases. Nat Biotechnol 31:827-832.
[0629] 13. Lin S, Staahl B, Alla R K, Doudna J A (2014) Enhanced homology-directed human genome engineering by controlled timing of CRISPR/Cas9 delivery. Elife 3.
[0630] 14. Shekhawat S S, Ghosh I (2011) Split-protein systems: beyond binary protein-protein interactions. Curr Opin Chem Biol 15:789-797.
[0631] 15. Konermann S et al. (2013) Optical control of mammalian endogenous transcription and epigenetic states. Nature 500:472-476.
[0632] 16. Lienert F et al. (2013) Two- and three-input TALE-based AND logic computation in embryonic stem cells. Nucleic Acids Res 41:9967-9975.
[0633] 17. Liang F-S, Ho W Q, Crabtree G R (2011) Engineering the ABA plant stress pathway for regulation of induced proximity Sci Signal 4:rs2-rs2.
[0634] 18. Kennedy M J et al. (2010) Rapid blue-light-mediated induction of protein interactions in living cells. Nat Meth 7:973-975.
[0635] 19. Wiedenheft B et al. (2011) Structures of the RNA-guided surveillance complex from a bacterial immune system. Nature 477:486-489.
[0636] 20. Jackson R N et al. (2014) Structural biology. Crystal structure of the CRISPR RNA-guided surveillance complex from Escherichia coli. Science 345:1473-1479.
[0637] 21. Mulepati S, Héroux A, Bailey S (2014) Structural biology. Crystal structure of a CRISPR RNA-guided surveillance complex bound to a ssDNA target. Science 345:1479-1484.
[0638] 22. Suloway C et al. (2005) Automated molecular microscopy: the new Leginon system. J Struct Biol 151:41-60.
[0639] 23. Lander G C et al. (2012) Complete subunit architecture of the proteasome regulatory particle. Nature 482:186-191.
[0640] 24. van Heel M, Harauz G, Orlova E V, Schmidt R, Schatz M (1996) A new generation of the IMAGIC image processing system. J Struct Biol 116:17-24.
[0641] 25. Kim H J, Lee H J, Kim H, Cho S W, Kim J-S (2009) Targeted genome editing in human cells with zinc finger nucleases constructed via modular assembly. Genome Res 19:1279-1288.
[0642] 26. Ran F A et al. (2013) Double nicking by RNA-guided CRISPR Cas9 for enhanced genome editing specificity. Cell 154:1380-1389.

The application's sequence listing, which the Patent Office published only in electronic form, follows.

SEQUENCE LISTING (1587 sequences)

SEQ ID NO: 1 - protein, 1056 aa, Pasteurella multocida
MQTTNLSYILGLDLGIASVGWAVVEINENEDPIGLIDVGVRIFERAEVPKTGESLALSRRLARSTRRLIRRRAHRLLLAKRFLKREGILSTIDLEKGLPNQAWELRVAGLERRLSAIEWGAVLLHLIKHRGYLSKRKNESQTNNKELGALLSGVAQNHQLLQSDDYRTPAELALKKFAKEEGHIRNQRGAYTHTFNRLDLLAELNLLFAQQHQFGNPHCKEHIQQYMTELLMWQKPALSGEAILKMLGKCTHEKNEFKAAKHTYSAERFVWLTKLNNLRILEDGAERALNEEERQLLINHPYEKSKLTYAQVRKLLGLSEQAIFKHLRYSKENAESATFMELKAWHAIRKALENQGLKDTWQDLAKKPDLLDEIGTAFSLYKTDEDIQQYLTNKVPNSVINALLVSLNFDKFIELSLKSLRKILPLMEQGKRYDQACREIYGHHYGEANQKTSQLLPAIPAQEIRNPVVLRTLSQARKVINAIIRQYGSPARVHIETGRELGKSFKERREIQKQQEDNRTKRESAVQKFKELFSDFSSEPKSKDILKFRLYEQQHGKCLYSGKEINIHRLNEKGYVEIDHALPFSRTWDDSFNNKVLVLASENQNKGNQTPYEWLQGKINSERWKNFVALVLGSQCSAAKKQRLLTQVIDDNKFIDRNLNDTRYIARFLSNYIQENLLLVGKNKKNVFTPNGQITALLRSRWGLIKARENNNRHHALDAIVVACATPSMQQKITRFIRFKEVHPYKIENRYEMVDQESGEIISPHFPEPWAYFRQEVNIRVFDNHPDTVLKEMLPDRPQANHQFVQPLFVSRAPTRKMSGQGHMETIKSAKRLAEGISVLRIPLTQLKPNLLENMVNKEREPALYAGLKARLAEFNQDPAKAFATPFYKQGGQQVKAIRVEQVQKSGVLVRENNGVADNASIVRTDVFIKNNKFFLVPIYTWQVAKGILPNKAIVAHKNEDEWEEMDEGAKFKFSLFPNDLVELKTKKEYFFGYYIGLDRATGNISLKEHDGEISKGKDGVYRVGVKLALSFEKYQVDELGKNRQICRPQQRQPVR

SEQ ID NO: 2 - protein, 1368 aa, Streptococcus pyogenes [sequence omitted]

SEQ ID NO: 3 - protein, 1334 aa, Listeria innocua
MKKPYTIGLDIGTNSVGWAVLTDQYDLVKRKMKIAGDSEKKQIKKNFWGVRLFDEGQTAADRRMARTARRRIERRRNRISYLQGIFAEEMSKTDANFFCRLSDSFYVDNEKRNSRHPFFATIEEEVEYHKNYPTIYHLREELVNSSEKADLRLVYLALAHIIKYRGNFLIEGALDTQNTSVDGIYKQFIQTYNQVFASGIEDGSLKKLEDNKDVAKILVEKVTRKEKLERILKLYPGEKSAGMFAQFISLIVGSKGNFQKPFDLIEKSDIECAKDSYEEDLESLLALIGDEYAELFVAAKNAYSAVVLSSIITVAETETNAKLSASMIERFDTHEEDLGELKAFIKLHLPKHYEEIFSNTEKHGYAGYIDGKTKQADFYKYMKMTLENIEGADYFIAKIEKENFLRKQRTFDNGAIPHQLHLEELEAILHQQAKYYPFLKENYDKIKSLVTFRIPYFVGPLANGQSEFAWLTRKADGEIRPWNIEEKVDFGKSAVDFIEKMTNKDTYLPKENVLPKHSLCYQKYLVYNELTKVRYINDQGKTSYFSGQEKEQIFNDLFKQKRKVKKKDLELFLRNMSHVESPTIEGLEDSFNSSYSTYHDLLKVGIKQEILDNPVNTEMLENIVKILTVFEDKRMIKEQLQQFSDVLDGVVLKKLERRHYTGWGRLSAKLLMGIRDKQSHLTILDYLMNDDGLNRNLMQLINDSNLSFKSIIEKEQVTTADKDIQSIVADLAGSPAIKKGILQSLKIVDELVSVMGYPPQTIVVEMARENQTTGKGKNNSRPRYKSLEKAIKEFGSQILKEHPTDNQELRNNRLYLYYLQNGKDMYTGQDLDIHNLSNYDIDHIVPQSFITDNSIDNLVLTSSAGNREKGDDVPPLEIVRKRKVFWEKLYQGNLMSKRKFDYLTKAERGGLTEADKARFIHRQLVETRQITKNVANILHQRFNYEKDDHGNTMKQVRIVTLKSALVSQFRKQFQLYKVRDVNDYHHAHDAYLNGVVANTLLKVYPQLEPEFVYGDYHQFDWFKANKATAKKQFYTNIMLFFAQKDRIIDENGEILWDKKYLDTVKKVMSYRQMNIVKKTEIQKGEFSKATIKPKGNSSKLIPRKTNWDPMKYGGLDSPNMAYAVVIEYAKGKNKLVFEKKIIRVTIMERKAFEKDEKAFLEEQGYRQPKVLAKLPKYTLYECEEGRRRMLASANEAQKGNQQVLPNHLVTLLHHAANCEVSDGKSLDYIESNREMFAELLAHVSEFAKRYTLAEANLNKINQLFEQNKEGDIKAIAQSFVDLMAFNAMGAPASFKFFETTIERKRYNNLKELLNSTIIYQSITGLYESRKRLDD

SEQ ID NO: 4 - protein, 1368 aa, Streptococcus pyogenes
MDKKYSIGLDIGTNSVGWAVITDDYKVPSKKLKGLGNTDRHGIKKNLIGALLFDSGETAEATRLKRTARRRYTRRKNRICYLQEIFSNEMAKVDDSFFHRLEESFLVEEDKKHERHPIFGNIVDEVAYHEKYPTIYHLRKKLADSTDKVDLRLIYLALAHMIKFRGHFLIEGDLNPDNSDVDKLFIQLVQTYNQLFEENPINASRVDAKAILSARLSKSRRLENLIAQLPGEKKNGLFGNLIALSLGLTPNFKSNFDLAEDAKLQLSKDTYDDDLDNLLAQIGDQYADLFLAAKNLSDATLLSDILRVNSEITKAPLSASMIKRYDEHHQDLTLLKALVRQQLPEKYKEIFFDQSKNGYAGYIDGGASQEEFYKFIKPILEKMDGTEELLAKLNREDLLRKQRTFDNGSIPYQIHLGELHAILRRQEDFYPFLKDNREKIEKILTFRIPYYVGPLARGNSRFAWMTRKSEETITPWNFEEVVDKGASAQSFIERMTNFDKNLPNEKVLPKHSLLYEYFTVYNELTKVKYVTEGMRKPAFLSGEQKKAIVDLLFKTNRKVTVKQLKEDYFKKIECFDSVEISGVEDRFNASLGTYHDLLKIIKDKDFLDNEENEDILEDIVLTLTLFEDREMIEERLKTYAHLFDDKVMKQLKRRRYTGWGRLSRKLINGIRDKQSGKTILDFLKSDGFANRNFMQLIHDDSLTFKEDIQKAQVSGQGDSLHEHIANLAGSPAIKKGILQTVKVVDELVKVMGRHKPENIVIEMARENQTTQKGQKNSRERMKRIEEGIKELGSDILKEYPVENTQLQNEKLYLYYLQNGRDMYVDQELDINRLSDYDVDHIVPQSFLKDDSIDNKVLTRSDKNRGKSDNVPSEEVVKKMKNYWRQLLNAKLITQRKFDNLTKAERGGLSELDKVGFIKRQLVETRQITKHVAQILDSRMNTKYDENDKLIREVRVITLKSKLVSDFRKDFQFYKVREINNYHHAHDAYLNAVVGTALIKKYPKLESEFVYGDYKVYDVRKMIAKSEQEIGKATAKYFFYSNIMNFFKTEITLANGEIRKRPLIETNGETGEIVWDKGRDFATVRKVLSMPQVNIVKKTEVQTGGFSKESILPKRNSDKLIARKKDWDPKKYGGFDSPTVAYSVLVVAKVEKGKSKKLKSVKELLGITIMERSSFEKDPIDFLEAKGYKEVRKDLIIKLPKYSLFELENGRKRMLASAGELQKGNELALPSKYVNFLYLASHYEKLKGSPEDNEQKQLFVEQHKHYLDEIIEQISEFSKRVILADANLDKVLSAYNKHRDKPIREQAENIIHLFTLTNLGAPAAFKYFDTTIDRKRYTSTKEVLDATLIHQSITGLYETRIDLSQLGGD

SEQ ID NO: 5 - protein, 1370 aa, Streptococcus agalactiae
MNKPYSIGLDIGTNSVGWSIITDDYKVPAKKMRVLGNTDKEYIKKNLIGALLFDGGNTAADRRLKRTARRRYTRRRNRILYLQEIFAEEMSKVDDSFFHRLEDSFLVEEDKRGSKYPIFATLQEEKDYHEKFSTIYHLRKELADKKEKADLRLIYIALAHIIKFRGHFLIEDDSFDVRNTDISKQYQDFLEIFNTTFENNDLLSQNVDVEAILTDKISKSAKKDRILAQYPNQKSTGIFAEFLKLIVGNQADFKKYFNLEDKTPLQFAKDSYDEDLENLLGQIGDEFADLFSAAKKLYDSVLLSGILTVIDLSTKAPLSASMIQRYDEHREDLKQLKQFVKASLPEKYQEIFADSSKDGYAGYIEGKTNQEAFYKYLSKLLTKQEDSENFLEKIKNEDFLRKQRTFDNGSIPHQVHLTELKAIIRRQSEYYPFLKENQDRIEKILTFRIPYYIGPLAREKSDFAWMTRKTDDSIRPWNFEDLVDKEKSAEAFIHRMTNNDFYLPEEKVLPKHSLIYEKFTVYNELTKVRYKNEQGETYFFDSNIKQEIFDGVFKEHRKVSKKKLLDFLAKEYEEFRIVDVIGLDKENKAFNASLGTYHDLEKILDKDFLDNPDNESILEDIVQTLTLFEDREMIKKRLENYKDLFTESQLKKLYRRHYTGWGRLSAKLINGIRDKESQKTILDYLIDDGRSNRNFMQLINDDGLSFKSIISKAQAGSHSDNLKEVVGELAGSPAIKKGILQSLKIVDELVKVMGYEPEQIVVEMARENQTTNQGRRNSRQRYKLLDDGVKNLASDLNGNILKEYPTDNQALQNERLFLYYLQNGRDMYTGEALDIDNLSQYDIDHIIPQAFIKDDSIDNRVLVSSAKNRGKSDDVPSLEIVKDCKVFWKKLLDAKLMSQRKYDNLTKAERGGLTSDDKARFIQRQLVETRQITKHVARILDERFNNELDSKGRRIRKVKIVTLKSNLVSNFRKEFGFYKIREVNNYHHAHDAYLNAVVAKAILTKYPQLEPEFVYGDYPKYNSYKTRKSATEKLFFYSNIMNFFKTKVTLADGTVVVKDDIEVNNDTGEIVWDKKKHFATVRKVLSYPQNNIVKKTEIQTGGFSKESILAHGNSDKLIPRKTKDIYLDPKKYGGFDSPIVAYSVLVVADIKKGKAQKLKTVTELLGITIMERSRFEKNPSAFLESKGYLNIRADKLIILPKYSLFELENGRRRLLASAGELQKGNELALPTQFMKFLYLASRYNESKGKPEEIEKKQEFVNQHVSYFDDILQLINDFSKRVILADANLEKINKLYQDNKENISVDELANNIINLFTFTSLGAPAAFKFFDKIVDRKRYTSTKEVLNSTLIHQSITGLYETRIDLGKLGED

SEQ ID NO: 6 - protein, 1345 aa, Streptococcus mutans
MKKPYSIGLDIGTNSVGWAVVTDDYKVPAKKMKVLGNTDKSHIEKNLLGALLFDSGNTAEDRRLKRTARRRYTRRRNRILYLQEIFSEEMGKVDDSFFHRLEDSFLVTEDKRGERHPIFGNLEEEVKYHENFPTIYHLRQYLADNPEKVDLRLVYLALAHIIKFRGHFLIEGKFDTRNNDVQRLFQEFLAVYDNTFENSSLQEQNVQVEEILTDKISKSAKKDRVLKLFPNEKSNGRFAEFLKLIVGNQADFKKHFELEEKAPLQFSKDTYEEELEVLLAQIGDNYAELFLSAKKLYDSILLSGILTVTDVGTKAPLSASMIQRYNEHQMDLAQLKQFIRQKLSDKYNEVFSDVSKDGYAGYIDGKTNQEAFYKYLKGLLNKIEGSGYFLDKIEREDFLRKQRTFDNGSIPHQIHLQEMRAIIRRQAEFYPFLADNQDRIEKLLTFRIPYYVGPLARGKSDFAWLSRKSADKITPWNFDEIVDKESSAEAFINRMTNYDLYLPNQKVLPKHSLLYEKFTVYNELTKVKYKTEQGKTAFFDANMKQEIFDGVFKVYRKVTKDKLMDFLEKEFDEFRIVDLTGLDKENKVFNASYGTYHDLCKILDKDFLDNSKNEKILEDIVLTLTLFEDREMIRKRLENYSDLLTKEQVKKLERRHYTGWGRLSAELIHGIRNKESRKTILDYLIDDGNSNRNFMQLINDDALSFKEEIAKAQVIGETDNLNQVVSDIAGSPAIKKGILQSLKIVDELVKIMGHQPENIVVEMARENQFTNQGRRNSQQRLKGLTDSIKEFGSQILKEHPVENSQLQNDRLFLYYLQNGRDMYTGEELDIDYLSQYDIDHIIPQAFIKDNSIDNRVLTSSKENRGKSDDVPSKDVVRKMKSYWSKLLSAKLITQRKFDNLTKAERGGLTDDDKAGFIKRQLVETRQITKHVARILDERFNTETDENNKKIRQVKIVTLKSNLVSNFRKEFELYKVREINDYHHAHDAYLNAVIGKALLGVYPQLEPEFVYGDYPHFHGHKENKATAKKFFYSNIMNFFKKDDVRTDKNGEIIWKKDEHISNIKKVLSYPQVNIVKKVEEQTGGFSKESILPKGNSDKLIPRKTKKFYWDTKKYGGFDSPIVAYSILVIADIEKGKSKKLKTVKALVGVTIMEKMTFERDPVAFLERKGYRNVQEENIIKLPKYSLFKLENGRKRLLASARELQKGNEIVLPNHLGTLLYHAKNIHKVDEPKHLDYVDKHKDEFKELLDVVSNFSKKYTLAEGNLEKIKELYAQNNGEDLKELASSFINLLTFTAIGAPATFKFFDKNIDRKRYTSTTEILNATLIHQSITGLYETRIDLNKLGGD

SEQ ID NO: 7 - protein, 1377 aa, Streptococcus agalactiae
MNKPYSIGLDIGTNSVGWSIITDDYKVPAKKMRVLGNTDKEYIKKNLIGALLFDGGNTAADRRLKRTARRRYTRRRNRILYLQEIFAEEMSKVDDSFFHRLEDSFLVEEDKRGSKYPIFATMQEEKYYHEKFPTIYHLRKELADKKEKADLRLVYLALAHIIKFRGHFLIEDDRFDVRNTDIQKQYQAFLEIFDTTFENNHLLSQNVDVEAILTDKISKSAKKDRILAQYPNQKSTGIFAEFLKLIVGNQADFKKHFNLEDKTPLQFAKDSYDEDLENLLGQIGDEFADLFSVAKKLYDSVLLSGILTVTDLSTKAPLSASMIQRYDEHHEDLKHLKQFVKASLPENYREVFADSSKDGYAGYIEGKTNQEAFYKYLLKLLTKQEGSEYFLEKIKNEDFLRKQRTFDNGSIPHQVHLTELRAIIRRQSEYYPFLKENQDRIEKILTFRIPYYVGPLAREKSDFAWMTRKTDDSIRPWNFEDLVDKEKSAEAFIHRMTNNDLYLPEEKVLPKHSLIYEKFTVYNELTKVRFLAEGFKDFQFLNRKQKETIFNSLFKEKRKVTEKDIISFLNKVDGYEGIAIKGIEKQFNASLSTYHDLKKILGKDFLDNTDNELILEDIVQTLTLFEDREMIKKCLDIYKDFFTESQLKKLYRRHYTGWGRLSAKLINGIRNKENQKTILDYLIDDGSANRNFMQLINDDDLSFKPIIDKARTGSHSDNLKEVVGELAGSPAIKKGILQSLKIVDELVKVMGYEPEQIVVEMARENQTTAKGLSRSRQRLTTLRESLANLKSNILEEKKPKYVKDQVENHHLSDDRLFLYYLQNGRDMYTKKALDIDNLSQYDIDHIIPQAFIKDDSIDNRVLVSSAKNRGKSDDVPSIEIVKARKMFWKNLLDAKLMSQRKYDNLTKAERGGLTSDDKARFIQRQLVETRQITKHVARILDERFNNEVDNGKKICKVKIVTLKSNLVSNFRKEFGFYKIREVNDYHHAHDAYLNAVVAKAILTKYPQLEPEFVYGMYRQKKLSKIVHEDKEEKYSEATRKMFFYSNLMNMFKRVVRLADGSIVVRPVIETGRYMRKTAWDKKKHFATVRKVLSYPQNNIVKKTEIQTGGFSKESILAHGNSDKLIPRKTKDIYLDPKKYGGFDSPIVAYSVLVVADIKKGKAQKLKTVTELLGITIMERSRFEKNPSAFLESKGYLNIRDDKLMILPKYSLFELENGRRRLLASAGELQKGNELALPTQFMKFLYLASRYNESKGKPEEIEKKQEFVNQHVSYFDDILQLINDFSKRVILADANLEKINKLYQDNKENIPVDELANNIINLFTFTSLGAPAAFKFFDKIVDRKRYTSTKEVLNSTLIHQSITGLYETRIDLGKLGED

SEQ ID NO: 8 - protein, 1368 aa, Streptococcus pyogenes; identical to SEQ ID NO: 4

SEQ ID NO: 9 - protein, 131 aa, Helicobacter hepaticus
MRILGFDIGITSIGWAYVESNELKDCGVRIFTKAENPKNGDSLAAPRREARGARRRLARRKARLNAIKRLLCKEFELNLNDYLANDGELPKAYQTSKDTKSPYELYTAFHWIIFAFCSIASSLSNRQMLPI

SEQ ID NO: 10 - protein, 1059 aa, Wolinella succinogenes
MIERILGVDLGISSLGWAIVEYDKDDEAANRIIDCGVRLFTAAETPKKKESPNKARREARGIRRVLNRRRVRMNMIKKLFLRAGLIQDVDLDGEGGMFYSKANRADVWELRHDGLYRLLKGDELARVLIHIAKHRGYKFIGDDEADEESGKVKKAGVVLRQNFEAAGCRTVGEWLWRERGANGKKRNKHGDYEISIHRDLLVEEVEAIFVAQQEMRSTIATDALKAAYREIAFFVRPMQRIEKMVGHCTYFPEERRAPKSAPTAEKFIAISKFFSTVIIDNEGWEQKIIERKTLEELLDFAVSREKVEFRHLRKFLDLSDNEIFKGLHYKGKPKTAKKREATLFDPNEPTELEFDKVEAEKKAWISLRGAAKLREALGNEFYGRFVALGKHADEATKILTYYKDEGQKRRELTKLPLEAEMVERLVKIGFSDFLKLSLKAIRDILPAMESGARYDEAVLMLGVPHKEKSAILPPLNKTDIDILNPTVIRAFAQFRKVANALVRKYGAFDRVHFELAREINTKGEIEDIKESQRKNEKERKEAADWIAETSFQVPLTRKNILKKRLYIQQDGRCAYTGDVIELERLFDEGYCEIDHILPRSRSADDSFANKVLCLARANQQKTDRTPYEWFGHDAARWNAFETRTSAPSNRVRTGKGKIDRLLKKNFDENSEMAFKDRNLNDTRYMARAIKTYCEQYWVFKNSHTKAPVQVRSGKLTSVLRYQWGLESKDRESHTHHAVDAIIIAFSTQGMVQKLSEYYRFKETHREKERPKLAVPLANFRDAVEEATRIENTETVKEGVEVKRLLISRPPRARVTGQAHEQTAKPYPRIKQVKNKKKWRLAPIDEEKFESFKADRVASANQKNFYETSTIPRVDVYHKKGKFHLVPIYLHEMVLNELPNLSLGTNPEAMDENFFKFSIFKDDLISIQTQGTPKKPAKIIMGYFKNMHGANMVLSSINNSPCEGFTCTPVSMDKKHKDKCKLCPEENRIAGRCLQGFLDYWSQEGLRPPRKEFECDQGVKFALDVKKYQIDPLGYYYEVKQEKRLGTIPQMRSAKKLVKK

SEQ ID NO: 11 - protein, 1409 aa, Wolinella succinogenes
MLVSPISVDLGGKNTGFFSFTDSLDNSQSGTVIYDESFVLSQVGRRSKRHSKRNNLRNKLVKRLFLLILQEHHGLSIDVLPDEIRGLFNKRGYTYAGFELDEKKKDALESDTLKEFLSEKLQSIDRDSDVEDFLNQIASNAESFKDYKKGFEAVFASATHSPNKKLELKDELKSEYGENAKELLAGLRVTKEILDEFDKQENQGNLPRAKYFEELGEYIATNEKVKSFFDSNSLKLTDMTKLIGNISNYQLKELRRYFNDKEMEKGDIWIPNKLHKITERFVRSWHPKNDADRQRRAELMKDLKSKEIMELLTTTEPVMTIPPYDDMNNRGAVKCQTLRLNEEYLDKHLPNWRDIAKRLNHGKFNDDLADSTVKGYSEDSTLLHRLLDTSKEIDIYELRGKKPNELLVKTLGQSDANRLYGFAQNYYELIRQKVRAGIWVPVKNKDDSLNLEDNSNMLKRCNHNPPHKKNQIHNLVAGILGVKLDEAKFAEFEKELWSAKVGNKKLSAYCKNIEELRKTHGNTFKIDIEELRKKDPAELSKEEKAKLRLTDDVILNEWSQKIANFFDIDDKHRQRFNNLFSMAQLHTVIDTPRSGFSSTCKRCTAENRFRSETAFYNDETGEFHKKATATCQRLPADTQRPFSGKIERYIDKLGYELAKIKAKELEGMEAKEIKVPIILEQNAFEYEESLRKSKTGSNDRVINSKKDRDGKKLAKAKENAEDRLKDKDKRIKAFSSGICPYCGDTIGDDGEIDHILPRSHTLKIYGTVFNPEGNLIYVHQKCNQAKADSIYKLSDIKAGVSAQWIEEQVANIKGYKTFSVLSAEQQKAFRYALFLQNDNEAYKKVVDWLRTDQSARVNGTQKYLAKKIQEKLTKMLPNKHLSFEFILADATEVSELRRQYARQNPLLAKAEKQAPSSHAIDAVMAFVARYQKVFKDGTPPNADEVAKLAMLDSWNPASNEPLTKGLSTNQKIEKMIKSGDYGQKNMREVFGKSIFGENAIGERYKPIVVQEGGYYIGYPATVKKGYELKNCKVVTSKNDIAKLEKIIKNQDLISLKENQYIKIFSINKQTISELSNRYFNMNYKNLVERDKEIVGLLEFIVENCRYYTKKVDVKFAPKYIHETKYPFYDDWRRFDEAWRYLQENQNKTSSKDRFVIDKSSLNEYYQPDKNEYKLDVDTQPIWDDFCRWYFLDRYKTANDKKSIRIKARKTFSLLAESGVQGKVFRAKRKIPTGYAYQALPMDNNVIAGDYANILLEANSKTLSLVPKSGISIEKQLDKKLDVIKKTDVRGLAIDNNSFFNADFDTHGIRLIVENTSVKVGNFPISAIDKSAKRMIFRALFEKEKGKRKKKTTISFKESGPVQDYLKVFLKKIVKIQLRTDGSISNIVVRKNAADFTLSFRSEHIQKLLK

SEQ ID NO: 12 - protein, 1374 aa, Fusobacterium nucleatum
MKKQKFSDYYLGFDIGTNSVGWCVTDLDYNVLRFNKKDMWGSRLFDEAKTAAERRVQRNSRRRLKRRKWRLNLLEEIFSDEIMKIDSNFFRRLKESSLWLEDKNSKEKFTLFNDDNYKDYDFYKQYPTIFHLRDELIKNPEKKDIRLIYLALHSIFKSRGHFLFEGQNLKEIKNFETLYNNLISFLEDNGINKSIDKDNIEKLEKIICDSGKGLKDKEKEFKGIFNSDKQLVAIFKLSVGSSVSLNDLFDTDEYKKEEVEKEKISFREQIYEDDKPIYYSILGEKIELLDIAKSFYDFMVLNNILSDSNYISEAKVKLYEEHKKDLKNLKYIIRKYNKENYDKLFKDKNENNYPAYIGLNKEKDKKEVVEKSRLKIDDLIKVIKGYLPKPERIEEKDKTIFNEILNKIELKTILPKQRISDNGTLPYQIHEVELEKILENQSKYYDFLNYEENGVSTKDKLLKTFKFRIPYYVGPLNSYHKDKGGNSWIVRKEEGKILPWNFEQKVDIEKSAEEFIKRMTNKCTYLNGEDVIPKDSFLYSEYIILNELNKVQVNDEFLNEENKRKIIDELFKENKKVSEKKFKEYLLVNQIANRTVELKGIKDSFNSNYVSYIKFKDIFGEKLNLDIYKEISEKSILWKCLYGDDKKIFEKKIKNEYGDILNKDEIKKINSFKFNTWGRLSEKLLTGIEFINLETGECYSSVMEALRRTNYNLMELLSSKFTLQESIDNENKEMNEVSYRDLIEESYVSPSLKRAILQTLKIYEEIKKITGRVPKKVFIEMARGGDESMKNKKIPARQEQLKKLYDSCGNDIANFSIDIKEMKNSLSSYDNNSLRQKKLYLYYLQFGKCMYTGREIDLDRLLQNNDTYDIDHIYPRSKVIKDDSFDNLVLVLKNENAEKSNEYPVKKEIQEKMKSFWRFLKEKNFISDEKYKRLTGKDDFELRGFMARQLVNVRQTTKEVGKILQQIEPEIKIVYSKAEIASSFREMFDFIKVRELNDTHHAKDAYLNIVAGNVYNTKFTEKPYRYLQEIKENYDVKKIYNYDIKNAWDKENSLEIVKKNMEKNTVNITRFIKEEKGELFNLNPIKKGETSNEIISIKPKLYDGKDNKLNEKYGYYTSLKAAYFIYVEHEKKNKKVKTFERITRIDSTLIKNEKNLIKYLVSQKKLLNPKIIKKIYKEQTLIIDSYPYTFTGVDSNKKVELKNKKQLYLEKKYEQILKNALKFVEDNQGETEENYKFIYLKKRNNNEKNETIDAVKERYNIEFNEMYDKFLEKLSSKDYKNYINNKLYTNFLNSKEKFKKLKLWEKSLILREFLKIFNKNTYGKYEIKDSQTKEKLFSFPEDTGRIRLGQSSLGNNKELLEESVTGLFVKKIKL

SEQ ID NO: 13 - protein, 1084 aa, Corynebacterium diphtheriae
MKYHVGIDVGTFSVGLAAIEVDDAGMPIKTLSLVSHIHDSGLDPDEIKSAVTRLASSGIARRTRRLYRRKRRRLQQLDKFIQRQGWPVIELEDYSDPLYPWKVRAELAASYIADEKERGEKLSVALRHIARHRGWRNPYAKVSSLYLPDGPSDAFKAIREEIKRASGQPVPETATVGQMVTLCELGTLKLRGEGGVLSARLQQSDYAREIQEICRMQEIGQELYRKIIDVVFAAESPKGSASSRVGKDPLQPGKNRALKASDAFQRYRIAALIGNLRVRVDGEKRILSVEEKNLVFDHLVNLTPKKEPEWVTIAEILGIDRGQLIGTATMTDDGERAGARPPTHDTNRSIVNSRIAPLVDWWKTASALEQHAMVKALSNAEVDDFDSPEGAKVQAFFADLDDDVHAKLDSLHLPVGRAAYSEDTLVRLTRRMLSDGVDLYTARLQEFGIEPSWTPPTPRIGEPVGNPAVDRVLKTVSRWLESATKTWGAPERVIIEHVREGFVTEKRAREMDGDMRRRAARNAKLFQEMQEKLNVQGKPSRADLWRYQSVQRQNCQCAYCGSPITFSNSEMDHIVPRAGQGSTNTRENLVAVCHRCNQSKGNTPFAIWAKNTSIEGVSVKEAVERTRHWVTDTGMRSTDFKKFTKAVVERFQRATMDEEIDARSMESVAWMANELRSRVAQHFASHGTTVRVYRGSLTAEARRASGISGKLKFFDGVGKSRLDRRHHAIDAAVIAFTSDYVAETLAVRSNLKQSQAHRQEAPQWREFTGKDAEHRAAWRVWCQKMEKLSALLTEDLRDDRVVVMSNVRLRLGNGSAHKETIGKLSKVKLSSQLSVSDIDKASSEALWCALTREPGFDPKEGLPANPERHIRVNGTHVYAGDNIGLFPVSAGSIALRGGYAELGSSFHHARVYKITSGKKPAFAMLRVYTIDLLPYRNQDLFSVELKPQTMSMRQAEKKLRDALATGNAEYLGWLVVDDELVVDTSKIATDQVKAVEAELGTIRRWRVDGFFSPSKLRLRPLQMSKEGIKKESAPELSKIIDRPGWLPAVNKLFSDGNVTVVRRDSLGRVRLESTAHLPVTWKVQ

SEQ ID NO: 14 - protein, 1395 aa, Treponema denticola
MKKEIKDYFLGLDVGTGSVGWAVTDTDYKLLKANRKDLWGMRCFETAETAEVRRLHRGARRRIERRKKRIKLLQELFSQEIAKTDEGFFQRMKESPFYAEDKTILQENTLFNDKDFADKTYHKAYPTINHLIKAWIENKVKPDPRLLYLACHNIIKKRGHFLFEGDFDSENQFDTSIQALFEYLREDMEVDIDADSQKVKEILKDSSLKNSEKQSRLNKILGLKPSDKQKKAITNLISGNKINFADLYDNPDLKDAEKNSISFSKDDFDALSDDLASILGDSFELLLKAKAVYNCSVLSKVIGDEQYLSFAKVKIYEKHKTDLTKLKNVIKKHFPKDYKKVFGYNKNEKNNNNYSGYVGVCKTKSKKLIINNSVNQEDFYKFLKTILSAKSEIKEVNDILTEIETGTFLPKQISKSNAEIPYQLRKMELEKILSNAEKHFSFLKQKDEKGLSHSEKIIMLLTFKIPYYIGPINDNHKKFFPDRCWVVKKEKSPSGKTTPWNFFDHIDKEKTAEAFITSRTNFCTYLVGESVLPKSSLLYSEYTVLNEINNLQIIIDGKNICDIKLKQKIYEDLFKKYKKITQKQISTFIKHEGICNKTDEVIILGIDKECTSSLKSYIELKNIFGKQVDEISTKNMLEEIIRWATIYDEGEGKTILKTKIKAEYGKYCSDEQIKKILNLKFSGWGRLSRKFLETVTSEMPGFSEPVNIITAMRETQNNLMELLSSEFTFTENIKKINSGFEDAEKQFSYDGLVKPLFLSPSVKKMLWQTLKLVKEISHITQAPPKKIFIEMAKGAELEPARTKTRLKILQDLYNNCKNDADAFSSEIKDLSGKIENEDNLRLRSDKLYLYYTQLGKCMYCGKPIEIGHVFDTSNYDIDHIYPQSKIKDDSISNRVLVCSSCNKNKEDKYPLKSEIQSKQRGFWNFLQRNNFISLEKLNRLTRATPISDDETAKFIARQLVETRQATKVAAKVLEKMFPETKIVYSKAETVSMFRNKFDIVKCREINDFHHAHDAYLNIVVGNVYNTKFTNNPWNFIKEKRDNPKIADTYNYYKVFDYDVKRNNITAWEKGKTIITVKDMLKRNTPIYTRQAACKKGELFNQTIMKKGLGQHPLKKEGPFSNISKYGGYNKVSAAYYTLIEYEEKGNKIRSLETIPLYLVKDIQKDQDVLKSYLTDLLGKKEFKILVPKIKINSLLKINGFPCHITGKTNDSFLLRPAVQFCCSNNEVLYFKKIIRFSEIRSQREKIGKTISPYEDLSFRSYIKENLWKKTKNDEIGEKEFYDLLQKKNLEIYDMLLTKHKDTIYKKRPNSATIDILVKGKEKFKSLIIENQFEVILEILKLFSATRNVSDLQHIGGSKYSGVAKIGNKISSLDNCILIYQSITGIFEKRIDLLKV

SEQ ID NO: 15 - protein, 1334 aa, Listeria monocytogenes
MKNPYTIGLDIGTNSVGWAVLTNQYDLVKRKMKVAGNSDKKQIKKNFWGVRLFDDGQTAVDRRMNRTARRRIERRRNRISYLQEIFAVEMANIDANFFCRLNDSFYVDSEKRNSRHPFFATIEEEVAYHDNYRTIYHLREKLVNSSEKADLRLVYLALAHIIKYRGNFLIEGALDTKNTSVDEVYKQFIETYNQVFMSNIEEGALAKVEENIEVANILAGKFTRREKFERILQLYPGEKSTGMFAQFISLIVGSKGNFQKVFDLIEKTDIECAKDSYEEDLETLLAIIGDEYAELFVAAKNTYNAVVLSSIITVTDTETNAKLSASMIERFDAHEKDLVELKAFIKLNLPKQYEEIFSNAAIDGYAGYIDGKTKQVDFYKYLKTILENIEGSDYFIAKIEEENFLRKQRTFDNGAIPHQLHLEELEAIIHQQAKYYPFLKEDYDKIKSLVTFRIPYFVGPLANGQSEFAWLTRKADGEIRPWNIEEKVDFGKSAVDFIEKMTNKDTYLPKENVLPKHSLCYQKYMVYNELTKIRYIDDQGKTNYFSGREKQQVFNDLFKQKRKVKKKDLELFLRNINHIESPTIEGLEDSFNASYATYHDLLKVGMKQEILDNPLNTEMLEDIVKILTVFEDKPMIKEQLQQFSDVLDGGVLKKLERRHYTGWGRLSAKLLVGIREKQSHLTILDYLMNDDGLNRNLMQLINDSNLSFKSIIEKEQVSTTDKDLQSIVAELAGSPAIKKGILQSLKIVDELVSIMGYPPQTIVVEMARENQTTGKGKNNSKPRYKSLEKAIKEFGSQILKEHPTDNQELKNNRLYLYYLQNGKDMYTGQELDIHNLSNYDIDHIVPQSFITDNSIDNLVLTSSAGNREKGGDVPPLEIVRKRKVFWEKLYQGNLMSKRKFDYLTKAERGGLTEADKARFIHRQLVETRQITKNVANILYQRFNKETDNHGNTMEQVRIVTLKSALVSQFRKQFQLYKVREVNGYHHAHDAYLNGVVANTLLKVYPQLEPEFVYGEYHQFDWFKANKATAKKQFYTNIMLFFAQKERIIDENGEILWDKKYLETIKKVLDYRQMNIVKKTEIQKGEFSKATIKPKGNSSKLIPRKENWDPMKYGGLDSPNMAYAVIIEHAKGKKKIVIEKKLIQINIMERKMFEKDEEAFLEEKGYRHPKVLTKLPKYTLYECEKGRRRMLASANEAQKGNQLVLSNHLVSLLYHAKNCEASDGKSLKYIEAHRETFSELLAQVSEFATRYTLADANLSKINNLFEQNKEGDIKAIAQSFVDLMAFNAMGAPASFKFFEATIDRKRYTNLKELLSSTIIYQSITGLYESRKRLDD

SEQ ID NO: 16 - protein, 1236 aa, Mycoplasma mobile
MYFYKNKENKLNKKVVLGLDLGIASVGWCLTDISQKEDNKFPIILHGVRLFETVDDSDDKLLNETRRKKRGQRRRNRRLFTRKRDFIKYLIDNNIIELEFDKNPKILVRNFIEKYINPFSKNLELKYKSVTNLPIGFHNLRKAAINEKYKLDKSELIVLLYFYLSLRGAFFDNPEDTKSKEMNKNEIEIFDKNESIKNAEFPIDKIIEFYKISGKIRSTINLKFGHQDYLKEIKQVFEKQNIDFMNYEKFAMEEKSFFSRIRNYSEGPGNEKSFSKYGLYANENGNPELIINEKGQKIYTKIFKTLWESKIGKCSYDKKLYRAPKNSFSAKVFDITNKLTDWKHKNEYISERLKRKILLSRFLNKDSKSAVEKILKEENIKFENLSEIAYNKDDNKINLPIINAYHSLTTIFKKHLINFENYLISNENDLSKLMSFYKQQSEKLFVPNEKGSYEINQNNNVLHIFDAISNILNKFSTIQDRIRILEGYFEFSNLKKDVKSSEIYSEIAKLREFSGTSSLSFGAYYKFIPNLISEGSKNYSTISYEEKALQNQKNNFSHSNLFEKTWVEDLIASPTVKRSLRQTMNLLKEIFKYSEKNNLEIEKIVVEVTRSSNNKHERKKIEGINKYRKEKYEELKKVYDLPNENTTLLKKLWLLRQQQGYDAYSLRKIEANDVINKPWNYDIDHIVPRSISFDDSFSNLVIVNKLDNAKKSNDLSAKQFIEKIYGIEKLKEAKENWGNWYLRNANGKAFNDKGKFIKLYTIDNLDEFDNSDFINRNLSDTSYITNALVNHLTFSNSKYKYSVVSVNGKQTSNLRNQIAFVGIKNNKETEREWKRPEGFKSINSNDFLIREEGKNDVKDDVLIKDRSFNGHHAEDAYFITIISQYFRSFKRIERLNVNYRKETRELDDLEKNNIKFKEKASFDNFLLINALDELNEKLNQMRFSRMVITKKNTQLFNETLYSGKYDKGKNTIKKVEKLNLLDNRTDKIKKIEEFFDEDKLKENELTKLHIFNHDKNLYETLKIIWNEVKIEIKNKNLNEKNYFKYFVNKKLQEGKISFNEWVPILDNDFKIIRKIRYIKFSSEEKETDEIIFSQSNFLKIDQRQNFSFHNTLYWVQIWVYKNQKDQYCFISIDARNSKFEKDEIKINYEKLKTQKEKLQIINEEPILKINKGDLFENEEKELFYIVGRDEKPQKLEIKYILGKKIKDQKQIQKPVKKYFPNWKKVNLTYMGEIFKK

SEQ ID NO: 17 - protein, 1372 aa, Legionella pneumophila
MESSQILSPIGIDLGGKFTGVCLSHLEAFAELPNHANTKYSVILIDHNNFQLSQAQRRATRHRVRNKKRNQFVKRVALQLFQHILSRDLNAKEETALCHYLNNRGYTYVDTDLDEYIKDETTINLLKELLPSESEHNFIDWFLQKMQSSEFRKILVSKVEEKKDDKELKNAVKNIKNFITGFEKNSVEGHRHRKVYFENIKSDITKDNQLDSIKKKIPSVCLSNLLGHLSNLQWKNLHRYLAKNPKQFDEQTFGNEFLRMLKNFRHLKGSQESLAVRNLIQQLEQSQDYISILEKTPPEITIPPYEARTNTGMEKDQSLLLNPEKLNNLYPNWRNLIPGIIDAHPFLEKDLEHTKLRDRKRIISPSKQDEKRDSYILQRYLDLNKKIDKFKIKKQLSFLGQGKQLPANLIETQKEMETHFNSSLVSVLIQIASAYNKEREDAAQGIWFDNAFSLCELSNINPPRKQKILPLLVGAILSEDFINNKDKWAKFKIFWNTHKIGRTSLKSKCKEIEEARKNSGNAFKIDYEEALNHPEHSNNKALIKIIQTIPDIIQAIQSHLGHNDSQALIYHNPFSLSQLYTILETKRDGFHKNCVAVTCENYWRSQKTEIDPEISYASRLPADSVRPFDGVLARMMQRLAYEIAMAKWEQIKHIPDNSSLLIPIYLEQNRFEFEESFKKIKGSSSDKTLEQAIEKQNIQWEEKFQRIINASMNICPYKGASIGGQGEIDHIYPRSLSKKHFGVIFNSEVNLIYCSSQGNREKKEEHYLLEHLSPLYLKHQFGTDNVSDIKNFISQNVANIKKYISFHLLTPEQQKAARHALFLDYDDEAFKTITKFLMSQQKARVNGTQKFLGKQIMEFLSTLADSKQLQLEFSIKQITAEEVHDHRELLSKQEPKLVKSRQQSFPSHAIDATLTMSIGLKEFPQFSQELDNSWFINHLMPDEVHLNPVRSKEKYNKPNISSTPLFKDSLYAERFIPVWVKGETFAIGFSEKDLFEIKPSNKEKLFTLLKTYSTKNPGESLQELQAKSKAKWLYFPINKTLALEFLHHYFHKEIVTPDDTTVCHFINSLRYYTKKESITVKILKEPMPVLSVKFESSKKNVLGSFKHTIALPATKDWERLFNHPNFLALKANPAPNPKEFNEFIRKYFLSDNNPNSDIPNNGHNIKPQKHKAVRKVFSLPVIPGNAGTMMRIRRKDNKGQPLYQLQTIDDTPSMGIQINEDRLVKQEVLMDAYKTRNLSTIDGINNSEGQAYATFDNWLTLPVSTFKPEIIKLEMKPHSKTRRYIRITQSLADFIKTIDEALMIKPSDSIDDPLNMPNEIVCKNKLFGNELKPRDGKMKIVSTGKIVTYEFESDSTPQWIQTLYVTQLKKQP

SEQ ID NO: 18 - protein, 1122 aa, Streptococcus thermophilus
MSDLVLGLDIGIGSVGVGILNKVTGEIIHKNSRIFPAAQAENNLVRRTNRQGRRLTRRKKHRIVRLNRLFEESGLITDFTKISINLNPYQLRVKGLTDELSNEELFIALKNMVKHRGISYLDDASDDGNSSVGDYAQIVKENSKQLETKTPGQIQLERYQTYGQLRGDFTVEKDGKKHRLINVFPTSAYRSEALRILQTQQEFNSQITDEFINRYLEILTGKRKYYHGPGNEKSRTDYGRYRTNGETLDNIFGILIGKCTFYPDEFRAAKASYTAQEFNLLNDLNNLTVPTETKKLSKEQKNQIINYVKNEKVMGPAKLFKYIAKLLSCDVADIKGHRIDKSGKAEIHTFEAYRKMKTLETLDIEQMDRETLDKLAYVLTLNTEREGIQEALEHEFADGSFSQKQVDELVQFRKANSSIFGKGWHNFSVKLMMELIPELYETSEEQMTILTRLGKQKTTSSSNKTKYIDEKLLTEEIYNPVVAKSVRQAIKIVNAAIKEYGDFDNIVIEMARETNEDDEKKAIQKIQKANKDEKDAAMLKAANQYNGKAELPHSVFHGHKQLATKIRLWHQQGERCLYTGKTISIHDLINNPNQFEVDHILPLSITFDDSLANKVLVYATANQEKGQRTPYQALDSMDDAWSFRELKAFVRESKTLSNKKKEYLLTEEDISKFDVRKKFIERNLVDTRYASRVVLNALQEHFRAHKIDTKVSVVRGQFTSQLRRHWGIEKTRDTYHHHAVDALIIAASSQLNLWKKQKNTLVSYSEEQLLDIETGELISDDEYKESVFKAPYQHFVDTLKSKEFEDSILFSYQVDSKFNRKISDATIYATRQAKVGKDKKDETYVLGKIKDIYTQDGYDAFMKIYKKDKSKFLMYRHDPQTFEKVIEPILENYPNKEMNEKGKEVPCNPFLKYKEEHGYIRKYSKKGNGPEIKSLKYYDSKLLGNPIDITPENSKNKVVLQSLKPWRTDVYFNKNTGKYEILGLKYADLQFEKKTGTYKISQEKYNGIMKEEGVDSDSEFKFTLYKNDLLLVKDTETKEQQLFRFLSRTMPNVKYYVELKPYSKDKFEKNESLIEILGSADKSGRCIKGLGKSNISIYKVRTDVLGNQHIIKNEGDKPKLDF

SEQ ID NO: 19 - protein, 1128 aa, Streptococcus thermophilus
MSDLVLGLDIGIGSVGVGILNKVTGEIIHKNSRIFPAAQAENNLVRRTNRQGRRLTRRKKHRIVRLNRLFEESGLITDFTKISINLNPYQLRVKGLTDELSNEELFIALKNMVKHRGISYLDDASDDGNSSVGDYAQIVKENSKQLETKTPGQIQLERYQTYGQLRGDFTVEKDGKKHRLINVFPTSAYRSEALRILQTQQEFNPQITDEFINRYLEILTGKRKYYHGPGNEKSRTDYGRYRTSGETLDNIFGILIGKCTFYPEEFRAAKASYTAQEFNLLNDLNNLTVPTETKKLSKEQKNQIINYVKNEKAMGPAKLFKYIAKLLSCDVADIKGYRIDKSGKAEIHTFEAYRKMKTLETLDIEQMDRETLDKLAYVLTLNTEREGIQEALEHEFADGSFSQKQVDELVQFRKANSSIFGKGWHNFSVKLMMELIPELYETSEEQMTILTRLGKQKRLRLQIKQNISNKTKYIDEKLLTEEIYNPVVAKSVRQAIKIVNAAIKEYGDFDNIVIEMARETNEDDEKKAIQKIQKANKDEKDAAMLKAANQYNGKAELPHSVFHGHKQLATKIRLWHQQGERCLYTGKTISIHDLINNPNQFEVDHILPLSITFDDSLANKVLVYATANQEKGQRTPYQALDSMDDAWSFRELKAFVRESKTLSNKKKEYLLTEEDISKFDVRKKFIERNLVDTRYASRVVLNALQEHFRAHKIDTKVSVVRGQFTSQLRRHWGIEKTRDTYHHHAVDALIIAASSQLNLWKKQKNTLVSYSEEQLLDIETGELISDDEYKESVFKAPYQHFVDTLKSKEFEDSILFSYQVDSKFNRKISDATIYATRQAKVGKDKKDETYVLGKIKDIYTQDGYDAFMKIYKKDKSKFLMYRHDPQTFEKVIEPILENYPNKQMNEKGKEVPCNPFLKYKEEHGYIRKYSKKGNGPEIKSLKYYDSKLLGNPIDITPENSKNKVVLQSLKPWRTDVYFNKATGKYEILGLKYADLQFEKGTGTYKISQEKYNDIKKKEGVDSDSEFKFTLYKNDLLLVKDTETKEQQLFRFLSRTLPKQKHYVELKPYDKQKFEGGEALIKVLGNVANGGQCIKGLAKSNISIYKVRTDVLGNQHIIKNEGDKPKLDF

SEQ ID NO: 20 - protein, 1123 aa, Francisella tularensis
MNVKILPIAIDLDVKNTGVFSAFYQKGTSLEKLDNKNGKVYELSKDSYTLLMNNRTARRHKRRGIDRKQLVKRLFKLVWTEQLNLEWDKDTQQAISFLFNRRGFSFITDGYSTEYLNIVPEQVKAILMDIFDDYNGEDDLDSYLKLATEQESKISEIYNKLMQKILEFKLRKLCTDIKDDKVSTKTLKEITSYEFELLADYLANYSESLKTQKFSYTDKQGNLKELSYYHHDKYNIQEFLKRHATINDEILGTLLTDDFDIWNFNFEKFDFDKNEEKLQNQEDKDHTQAHLHHFVFVVNKIKSEMASGGRHRSQYFQEITNVLDENNHQEGYLKNFCENLHNKKYSNLSVKNLVNLVGNLSNLELKPLRKYFNDKIHAKADHWDEQKFTETYCHWILGEWRVGVKDQDKKDGAKYSYKDLCNELKQKVTKAGLIDFLLELDPCRTIPPYLDNNNRKPPKCQSLILNPKFLDNQYPNWQQYLQELKKLQSIQDYLDSFETDLKDLKSSKDQPYFVEYKSSNQQMASGQRDYKDLDARILQFIFDRVKASDELLLNEIYFQAKKLKQKASSELEKLESSKKLDEVIANSQLSQILKSQHTNGIFEQGTFLHLVCKYYKQRQRARDSRLYIMPEYRYDKKLDKYNNTGRFDDNNQLLTYCNHKPRQKRYQLLNDLAGVLQVSRNQLLSSVEEWFQQAQRVGEISKSQDEQIFEWLKSFKIASYCKAAVEMQKQYRGTLKNAIQTAIFRQSENINKNKNTGNQQQALSENSKDVKSLTADEKKLLKLIENIAKASQKIGESLGLNDKQIKKFNSIYSFAQIQQIAFAKRKGNANTCAVCSADNAHRMQQIKITELVEDNKDNIILSAKAQRLPAIPTRIVDGAVKKMATILAKNIVDDNWQNIKQVLSAKHQLHIPIITESNAFEFEPALADVKGKSLKDRRKKALERISPENIFKDKNNRIKEFAKGISAYSGANLTDGDFDGAKEELDHIIPRSHKKYGTLNDEANLICVTRDDNKNIFAIDTSKWFEIETPSDLRDIGVATIQYKIDNNSRPKVRVKLDYVIDDDSKINYFMNHSLLKSRYPDKVLEILKQSTIIEFESSGFNKTIKEMLGMTLAGIYNETSNN

SEQ ID NO: 21 - protein, 1436 aa, Bacteroides fragilis
MKRILGLDLGTNSIGWALVNEAENKDERSSIVKLGVRVNPLTVDELTNFEKGKSITTNADRTLKRGMRRNLQRYKLRRETLTEVLKEHKLITEDTILSENGNRTTFETYRLRAKAVTEEISLEEFARVLLMINKKRGYKSSRKAKGVEEGTLIDGMDIARELYNNNLTPGELCLQLLDAGKKFLPDFYRSDLQNELDRIWEKQKEYYPEILTDVLKEELRGKKRDAVWAICAKYFVWKENYTEWNKEKGKTEQQEREHKLEGIYSKRKRDEAKRENLQWRVNGLKEKLSLEQLVIVFQEMNTQINNSSGYLGAISDRSKELYFNKQTVGQYQMEMLDKNPNASLRNMVFYRQDYLDEFNMLWEKQAVYHKELTEELKKEIRDIIIFYQRRLKSQKGLIGFCEFESRQIEVDIDGKKKIKTVGNRVISRSSPLFQEFKIWQILNNIEVTVVGKKRKRRKLKENYSALFEELNDAEQLELNGSRRLCQEEKELLAQELFIRDKMTKSEVLKLLFDNPQELDLNFKTIDGNKTGYALFQAYSKMIEMSGHEPVDFKKPVEKVVEYIKAVFDLLNWNTDILGFNSNEELDNQPYYKLWHLLYSFEGDNTPTGNGRLIQKMTELYGFEKEYATILANVSFQDDYGSLSAKAIHKILPHLKEGNRYDVACVYAGYRHSESSLTREEIANKVLKDRLMLLPKNSLHNPVVEKILNQMVNVINVIIDIYGKPDEIRVELARELKKNAKEREELTKSIAQTTKAHEEYKTLLQTEFGLTNVSRTDILRYKLYKELESCGYKTLYSNTYISREKLFSKEFDIEHIIPQARLFDDSFSNKTLEARSVNIEKGNKTAYDFVKEKFGESGADNSLEHYLNNIEDLFKSGKISKTKYNKLKMAEQDIPDGFIERDLRNTQYIAKKALSMLNEISHRVVATSGSVTDKLREDWQLIDVMKELNWEKYKALGLVEYFEDRDGRQIGRIKDWTKRNDHRHHAMDALTVAFTKDVFIQYFNNKNASLDPNANEHAIKNKYFQNGRAIAPMPLREFRAEAKKHLENTLISIKAKNKVITGNINKTRKKGGVNKNMQQTPRGQLHLETIYGSGKQYLTKEEKVNASFDMRKIGTVSKSAYRDALLKRLYENDNDPKKAFAGKNSLDKQPIWLDKEQMRKVPEKVKIVTLEAIYTIRKEISPDLKVDKVIDVGVRKILIDRLNEYGNDAKKAFSNLDKNPIWLNKEKGISIKRVTISGISNAQSLHVKKDKDGKPILDENGRNIPVDFVNTGNNHHVAVYYRPVIDKRGQLVVDEAGNPKYELEEVVVSFFEAVTRANLGLPIIDKDYKTTEGWQFLFSMKQNEYFVFPNEKTGFNPKEIDLLDVENYGLISPNLFRVQKFSLKNYVFRHHLETTIKDTSSILRGITWIDFRSSKGLDTIVKVRVNHIGQIVSVGEY

SEQ ID NO: 22 - protein, 1314 aa, Mycoplasma synoviae
MLRLYCANNLVLNNVQNLWKYLLLLIFDKKIIFLFKIKVILIRRYMENNNKEKIVIGFDLGVASVGWSIVNAETKEVIDLGVRLFSEPEKADYRRAKRTTRRLLRRKKFKREKFHKLILKNAEIFGLQSRNEILNVYKDQSSKYRNILKLKINALKEEIKPSELVWILRDYLQNRGYFYKNEKLTDEFVSNSFPSKKLHEHYEKYGFFRGSVKLDNKLDNKKDKAKEKDEEEESDAKKESEELIFSNKQWINEIVKVFENQSYLTESFKEEYLKLFNYVRPFNKGPGSKNSRTAYGVFSTDIDPETNKFKDYSNIWDKTIGKCSLFEEEIRAPKNLPSALIFNLQNEICTIKNEFTEFKNWWLNAEQKSEILKFVFTELFNWKDKKYSDKKFNKNLQDKIKKYLLNFALENFNLNEEILKNRDLENDTVLGLKGVKYYEKSNATADAALEFSSLKPLYVFIKFLKEKKLDLNYLLGLENTEILYFLDSIYLAISYSSDLKERNEWFKKLLKELYPKIKNNNLEIIENVEDIFEITDQEKFESFSKTHSLSREAFNHIIPLLLSNNEGKNYESLKHSNEELKKRTEKAELKAQQNQKYLKDNFLKEALVPLSVKTSVLQAIKIFNQIIKNFGKKYEISQVVIEMARELTKPNLEKLLNNATNSNIKILKEKLDQTEKFDDFTKKKFIDKIENSVVFRNKLFLWFEQDRKDPYTQLDIKINEIEDETEIDHVIPYSKSADDSWFNKLLVKKSTNQLKKNKTVWEYYQNESDPEAKWNKFVAWAKRIYLVQKSDKESKDNSEKNSIFKNKKPNLKFKNITKKLFDPYKDLGFLARNLNDTRYATKVFRDQLNNYSKHHSKDDENKLFKVVCMNGSITSFLRKSMWRKNEEQVYRFNFWKKDRDQFFHHAVDASIIAIFSLLTKTLYNKLRVYESYDVQRREDGVYLINKETGEVKKADKDYWKDQHNFLKIRENAIEIKNVLNNVDFQNQVRYSRKANTKLNTQLFNETLYGVKEFENNFYKLEKVNLFSRKDLRKFILEDLNEESEKNKKNENGSRKRILTEKYIVDEILQILENEEFKDSKSDINALNKYMDSLPSKFSEFFSQDFINKCKKENSLILTFDAIKHNDPKKVIKIKNLKFFREDATLKNKQAVHKDSKNQIKSFYESYKCVGFIWLKNKNDLEESIFVPINSRVIHFGDKDKDIFDFDSYNKEKLLNEINLKRPENKKFNSINEIEFVKFVKPGALLLNFENQQIYYISTLESSSLRAKIKLLNKMDKGKAVSMKKITNPDEYKIIEHVNPLGINLNWTKKLENNN

SEQ ID NO: 23 - protein, 1368 aa, Streptococcus pyogenes
MDKKYSIGLDIGTNSVGWAVITDDYKVPSKKFKVLGNTDRHSIKKNLIGALLFDSGETAEATRLKRTARRRYTRRKNRICYLQEIFSNEMAKVDDSFFHRLEESFLVEEDKKHERHPIFGNIVDEVAYHEKYPTIYHLRKKLVDSTDKADLRLIYLALAHMIKFRGHFLIEGDLNPDNSDVDKLFIQLVQTYNQLFEENPINASGVDAKAILSARLSKSRRLENLIAQLPGEKKNGLFGNLIALSLGLTPNFKSNFDLAEDAKLQLSKDTYDDDLDNLLAQIGDQYADLFLAAKNLSDAILLSDILRLNSEITKAPLSASMIKRYDEHHQDLTLLKALVRQQLPEKYKEIFFDQSKNGYAGYIDGGASQEEFYKFIKPILEKMDGTEELLAKLNREDLLRKQRTFDNGSIPHQIHLGELHAILRRQEDFYPFLKDNREKIEKILTFRIPYYVGPLARGNSRFAWMTRKSEETITPWNFEEVVDKGASAQSFIERMTNFDKNLPNEKVLPKHSLLYEYFTVYNELTKVKYVTEGMRKPAFLSGEQKKAIVDLLFKTNRKVTVKQLKEDYFKKIECFDSVEISGVEDRFNASLGTYHDLLKIIKDKDFLDNEENEDILEDIVLTLTLFEDREMIEERLKTYAHLFDDKVMKQLKRRRYTGWGRLSRKLINGIRDKQSGKTILDFLKSDGFANRNFMQLIHDDSLTFKEDIQKAQVSGQGDSLHEHIANLAGSPAIKKGILQTVKVVDELVKVMGRHKPENIVIEMARENQTTQKGQKNSRERMKRIEEGIKELGSQILKEHPVENTQLQNEKLYLYYLQNGRDMYVDQELDINRLSDYDVDHIVPQSFIKDDSIDNKVLTRSDKNRGKSNNVPSEEVVKKMKNYWRQLLNAKLITQRKFDNLTKAERGGLSELDKAGFIKRQLVETRQITKHVAQILDSRMNTKYDENDKLIREVKVITLKSKLVSDFRKDFQFYKVREINNYHHAHDAYLNAVVGTALIKKYPKLESEFVYGDYKVYDVRKMIAKSEQEIGKATAKYFFYSNIMNFFKTEITLANGEIRKRPLIETNGETGEIVWDKGRDFATVRKVLSMPQVNIVKKTEVQTGGFSKESILPKRNSDKLIARKKDWDPKKYGGFDSPTVAYSVLVVAKVEKGKSKKLKSVKELLGITIMERSSFEKNPIDFLEAKGYKEVRKDLIVKLPKYSLFELENGRKRMLASAGELQKGNELALPSKYVNFLYLASHYEKLKGSPEDNEQKQLFVEQHKHYLDEIIEQISEFSKRVILADANLDKVLSAYNKHRDKPIREQAENIIHLFTLTNLGAPAAFKYFDTTIDRKRYTSTKEVLDATFIHQSITGLYETRIDLSQLGGD

SEQ ID NO: 24 - protein, 1368 aa, Streptococcus pyogenes
MDKKYSIGLDIGTNSVGWAVITDDYKVPSKKFKVLGNTDRHSIKKNLIGALLFDSGETAEATRLKRTARRRYTRRKNRICYLQEIFSNEMAKVDDSFFHRLEESFLVEEDKKHERHPIFGNIVDEVAYHEKYPTIYHLRKKLVDSTDKADLRLIYLALAHMIKFRGHFLIEGDLNPDNSDVDKLFIQLVQTYNQLFEENPINASGVDAKAILSARLSKSRRLENLIAQLPGEKKNGLFGNLIALSLGLTPNFKSNFDLAEDAKLQLSKDTYDDDLDNLLAQIGDQYADLFLAAKNLSDAILLSDILRVNTEITKAPLSASMIKRYDEHHQDLTLLKALVRQQLPEKYKEIFFDQSKNGYAGYIDGGASQEEFYKFIKPILEKMDGTEELLVKLNREDLLRKQRTFDNGSIPHQIHLGELHAILRRQEDFYPFLKDNREKIEKILTFRIPYYVGPLARGNSRFAWMTRKSEETITPWNFEEVVDKGASAQSFIERMTNFDKNLPNEKVLPKHSLLYEYFTVYNELTKVKYVTEGMRKPAFLSGEQKKAIVDLLFKTNRKVTVKQLKEDYFKKIECFDSVEISGVEDRFNASLGTYHDLLKIIKDKDFLDNEENEDILEDIVLTLTLFEDREMIEERLKTYAHLFDDKVMKQLKRRRYTGWGRLSRKLINGIRDKQSGKTILDFLKSDGFANRNFMQLIHDDSLTFKEDIQKAQVSGQGDSLHEHIANLAGSPAIKKGILQTVKVVDELVKVMGRHKPENIVIEMARENQTTQKGQKNSRERMKRIEEGIKELGSQILKEHPVENTQLQNEKLYLYYLQNGRDMYVDQELDINRLSDYDVDHIVPQSFLKDDSIDNKVLTRSDKNRGKSDNVPSEEVVKKMKNYWRQLLNAKLITQRKFDNLTKAERGGLSELDKAGFIKRQLVETRQITKHVAQILDSRMNTKYDENDKLIREVKVITLKSKLVSDFRKDFQFYKVREINNYHHAHDAYLNAVVGTALIKKYPKLESEFVYGDYKVYDVRKMIAKSEQEIGKATAKYFFYSNIMNFFKTEITLANGEIRKRPLIETNGETGEIVWDKGRDFATVRKVLSMPQVNIVKKTEVQTGGFSKESILPKRNSDKLIARKKDWDPKKYGGFDSPTVAYSVLVVAKVEKGKSKKLKSVKELLGITIMERSSFEKNPIDFLEAKGYKEVKKDLIIKLPKYSLFELENGRKRMLASAGELQKGNELALPSKYVNFLYLASHYEKLKGSPEDNEQKQLFVEQHKHYLDEIIEQISEFSKRVILADANLDKVLSAYNKHRDKPIREQAENIIHLFTLTNLGAPAAFKYFDTTIDRKRYTSTKEVLDATLIHQSITGLYETRIDLSQLGGD

SEQ ID NO: 25 - protein, 1370 aa, Streptococcus agalactiae; identical to SEQ ID NO: 5

SEQ ID NO: 26 - protein, 1173 aa, Rhodospirillum rubrum
MRPIEPWILGLDIGTDSLGWAVFSCEEKGPPTAKELLGGGVRLFDSGRDAKDHTSRQAERGAFRRARRQTRTWPWRRDRLIALFQAAGLTPPAAETRQIALALRREAVSRPLAPDALWAALLHLAHHRGFRSNRIDKRERAAAKALAKAKPAKATAKATAPAKEADDEAGFWEGAEAALRQRMAASGAPTVGALLADDLDRGQPVRMRYNQSDRDGVVAPTRALIAEELAEIVARQSSAYPGLDWPAVTRLVLDQRPLRSKGAGPCAFLPGEDRALRALPTVQDFIIRQTLANLRLPSTSADEPRPLTDEEHAKALALLSTARFVEWPALRRALGLKRGVKFTAETERNGAKQAARGTAGNLTEAILAPLIPGWSGWDLDRKDRVFSDLWAARQDRSALLALIGDPRGPTRVTEDETAEAVADAIQIVLPTGRASLSAKAARAIAQAMAPGIGYDEAVTLALGLHHSHRPRQERLARLPYYAAALPDVGLDGDPVGPPPAEDDGAAAEAYYGRIGNISVHIALNETRKIVNALLHRHGPILRLVMVETTRELKAGADERKRMIAEQAERERENAEIDVELRKSDRWMANARERRQRVRLARRQNNLCPYTSTPIGHADLLGDAYDIDHVIPLARGGRDSLDNMVLCQSDANKTKGDKTPWEAFHDKPGWIAQRDDFLARLDPQTAKALAWRFADDAGERVARKSAEDEDQGFLPRQLTDTGYIARVALRYLSLVTNEPNAVVATNGRLTGLLRLAWDITPGPAPRDLLPTPRDALRDDTAARRFLDGLTPPPLAKAVEGAVQARLAALGRSRVADAGLADALGLTLASLGGGGKNRADHRHHFIDAAMIAVTTRGLINQINQASGAGRILDLRKWPRTNFEPPYPTFRAEVMKQWDHIHPSIRPAHRDGGSLHAATVFGVRNRPDARVLVQRKPVEKLFLDANAKPLPADKIAEIIDGFASPRMAKRFKALLARYQAAHPEVPPALAALAVARDPAFGPRGMTANTVIAGRSDGDGEDAGLITPFRANPKAAVRTMGNAVYEVWEIQVKGRPRWTHRVLTRFDRTQPAPPPPPENARLVMRLRRGDLVYWPLESGDRLFLVKKMAVDGRLALWPARLATGKATALYAQLSCPNINLNGDQGYCVQSAEGIRKEKIRTTSCTALGRLRLSKKAT

SEQ ID NO: 27 - protein, 997 aa, Maritimibacter alkaliphilus
MKVLVDAGLMPSDPAAAKALETLDPYELRATGLDVMLPLTHLGRAVFHLNQRRGFKSNRKTDRGDNESGKIKDATKRLTWAMQEAGARTYGEFLHMRRARASDPRQVPSVRTRLSVASRGGPDSKEEAGYDFYPERAHLEDEFHALWSAQAAFHPDLTCELRDVVFEKIFYQRPLKEPKVGLCLFTAEERLPKAHPLTGRRVLYETVNQLRVTADGRTTRPLTLEERDMIVYALDNKKPVKSLSSMHLKLVALGKLVKLKDGERFTLESGVRDAIACDPIRATMGHPDGFGPAWSRLDWQAQWALIEKLRQVQSDDDFASLVAWLGATHNLSEDHAKRVANLHLPEGYGRLGLTATEAILCNLKAEVCTYSQAVERWGKHHSNQRTGECLEALPYYGEVLDRHVIPGTYNEDDDDVTRYGRITNPTVHIGLNQLRRLVNRIIATYGKPDQIVVELARELKQSEAQKSEALKKIRDTTADAIRRGRQLEEIGQKNTGANRLLLRLWEDLGPAVGPRCCPYTGKPISVTMLFDGACDVDHILPYSRTLDDSFANRTICLREANRQKGDRTPWEAWGGSDQWDAIEANLKDLPENKRKRFAPDAMERFEGERDFLDRALVDTQYLARISRAYLDTLFTEGGHVWVVPGRMTEMLRRHWGLNALLSDKDRGAGKVKNRTDHRHHAIDAAVIAATDHSLVNRISKAAGQGESAGQSAELIARDTPEPWEGFRNDISAQIARIVVSHRADHGRIDVEGRKHGKDSTAGRLHNDTAYGIVDDHTVVSRTPLLSLKPGDIEVTTKGKNIRDTQLQKALSVATTGKDGKGFEEALRNFAEKEGPYQGIRRVRLIETLQSSARVEVGSDEDGQPLKAYKGDSNHCYDLWKLPDGKVVPHVVSTYEAHAGTDKRPHPAAKRILRVFKKDMVAIEQDDQTAIFYVQKLDRANGLFLAPHLEANADARHRNPNDAFKFLQMGAGSVVRNKLRRVYVDEIGRIKDPGPPKH

SEQ ID NO: 28 - protein, 1027 aa, Blastopirellula marina
MFSESGDQPSLVDCGVRIFPEGVERDQQGGEKSKSQSRRVARGIRRQVRRRAQRLRHLKHALITTGLFPADVVDQQEVLASNPYELRSRALSEKLEPYEIGRILLHLAKRRGFLSNRTTDRSGGNELKGILAEMTQLQGEIAAHGCQTLGQYLHQLGDDGETFAQRLRGRHTLRAMYEDEFEKIWERQASYYPALLTEELRGGEEGKQSYPLVPTARRKSESLLKRFGLHGLLFFQRKMYWPKSVIGRCDLEPKEKRCPKADRLAQRFRILQEVNNLRLISPADRKEYTFAEFVGAGADKKLVDYLCEAKERTFPQIRKKFKLPETISFNYERGERSKLQGHETDAHFNGKKGLGKRRWSEIAEDVKDHIIQIVLEEDREDVALRKLTQDCSLTVEEAHKAMALHLPAGYSQYSRVAISRLLPHLELGKLLMGNDASDSAMHAAGYLRPDEREVRQYDLLPEPPDIPNPLVRQALYEVRKVINAIIREYGALGTIRVELAREAKKSAEQRTQIRIANAKRERENAAIAKTLQEMSPAIRPTRRNIQRYLLWKDQGGVCIYTGKVISQAQLFDSGEVDVDHILPRWRSLDDSMANKVIAHRSANNEKGDRTPWEWLGHDKPRFDELLLRAQRLPYGKRQRFIQKEVELTNFVERQLRDTTYVSRLVVQYLKGLGVPITTVKGPMTAELRHHWGLNALLNEDGSQKKNRSDHRHHAIDAIVIGLTDAKRLHALANARGKDLQPPWSEFRSDVATALGRMAVSHRVRRRIQGALHEETIYGPTQKAAQPTSTDQRPWAKDWIEDSQIVVRRKSVSDLTNTKHLAKIRDVTIRKILEDHLRRQKVDPTKPGVIPKDAFAGSNAPQMPSGVPIKKVRLVERGETWRKIGSGEASKFIKPGSNHHISYFAISRKGRESWKAHVTIMLDAACIAKESINNGKIVNRSIGDQGRFLMSLSIGEMFEITNNGGEILLCVVRKIDQSGRIYYKIHDDARESMDLKKDNLYMSPSKMQQFDARKVTVTPLGKIRNAND

SEQ ID NO: 29 - protein, 158 aa, Francisella tularensis
MIDFLLELDPCITIPPYLDNNNRKPPKCQSLILNPKFLDNQYPNWQQYLQELKKLQSIQDYLDSFETDLKDLKSSKDQPYFVEYKSSNQQMASGQRDYKDLDARILQFIFDRVKASDELLLSEIYFQAKKLKQKASSELEKLESSKKLDEVIANSQLS

SEQ ID NO: 30 - protein, 393 aa, Francisella tularensis
MNVKILPIAIDLDVKNTGVFSAFYQKGTSLEKLDNKNGKVYELSKDSYTLLMNNRTAQRHQRRGIDRKQLVKRLFKLVWTEQLNLEWDKDTQQAISFLFNRRGFSFITDGYSTEYLNIVPEQVKAILMDIFDDYNGEDDLDSYLKLATEQESKISEIYNKLMQKILEFKLRKLCTDIKDDKVSTKTLKEITSYEFELLADYLANYSESLKTQKFSYTDKQGNLKELSYYHHDKYNIQEFLKRHATINDEILDTLLTDDFDIWNFNFEKFDFDKNEEKLQSQEDKDHTQAYFHHFVFAVNKIKSEMASGGRHRSQYFQEITNVLDENNHQEGYLKNFCENLHNKKYSNLSVKNLVNLVGNLSNLELKPLRKYFNDKNLIIGMSKSLQKLIATGY

SEQ ID NO: 31 - protein, 1066 aa, Rhodopseudomonas palustris
MSERVVRRILGIDLGIASCGWGVVDISGAGGGIIATGVRCFDAPLIDKTGEPKSATRRTARGQRRIVRRRRQRMNGVRRLLCEFGLLPDPRPDALNQAMRRISTASAAAQVTPWTLRAAAHQRLLSNEELAVVLGHIARHRGFRSNAKNEAGANAADETSKMKKAMEATREGLAKYHAFGDMIANDPKFANRKRNRDKDYSHTAKRSDLEDEVRAILRAQLRFGSAAATETLAQTFADVAFFQRPLQDSEDRVGDCPFEPGQKRAARRAPSFELFRFLSRLANLKLAVGRSPERRLTAEEIALAAKGFGETKKTITFKSLREALDLDPNARFSGIGKDKEASLDVVARTGGAAYGTKTLKDALGDAPWRSLSRTPETLDRIAEILSFREDITSIRNGLEDLGLDSLVVEALMQAAANGDFKEFTRAGHISARAARNIIPGLREGLVYSEACARVGYDHAARLSVPLDQVGSPVTRKALSEALKQVRAVAREYGPIDYFHIELARSVGKSAEERKQLTDGIEARNVEKAKRRKQAEEHLGRAPSDDELLRYELAKEQNFKCIYSGDAIDPAGVAANDTRYQVDHILPWSRFGDDSYLNKTLCTARSNQNKRGRTPFEWFEADKTDVEWMEYVARVENLQEVKGRKKRNYSIKDAAAIEDKFKARNLTDTQWATRLLADELSRMFPPRECERAICGRADGGNDGLTIVEERRVFTRPGAITSKLRRAWGLEGLKKQDGKRVEDDRHHAVDALVLAATTESLLQRLTVEVQRREREGRPDDIFHCAEPWRGFRADVRRTVYGSETMPGIFVSRAERRRARGKAHDATIKQIREIEGERLVFERKPVEKLTDKDLEKIPIPKPYGQVSDPKRLRDELVESLRAWIAAGKPKDRPPLSPKGDVIRKVRIQTNDKVSVEINGGTVDRGDMARVDVFRKKNKKAVWEYYVVPIYPHQIVALNDPPDRAVIAYAEDKDWKEIDSSYEFLWSLFGLSYVEISKANGECIDGYFRGLHRGTGAASVCKHISLGKDATVSGIGLKTLASFKKFTIDRLGRKFEIPREVRTWRGEACT

SEQ ID NO: 32 - protein, 1149 aa, Lactobacillus salivarius
MERYHIGLDIGTSSIGWAVIGDDFKIKRKKGKNLIGVRLFKEGDTAAERRGFRTQRRRLNRRKWRLKLLEEIFDPYMAEVDKYFFARLKESNLSPKDSNKKYLGSLLFPDISDSNFYDKYPTIYHLRRDLMEKDKKFDLREIYLAIHHIVKYRGNFLEKVPAKNYKNSGASIGFLLEEVNDLYGNIIGNEDVAILDNDKFEDVEKIILNDEIRNIDKQKNVGRLLVKDKKEKNIVTAFSKAIFGYKFNLEDLLLIESDEKNKLTFNDENIDDIFNELSHSLNDNQMDLLTKTREIYFKFKLNMIVPTGYTISESMIEKYEMHKAHLKMYKEFINTLNAKDRKILKNAYSDYINNEKAKAANAQENFYKTVKKTIKENDSDTAKKIIGLIDEGNFMPKQRTGENGVIPHQLHQIELDRIIENQAKYYPWLAEENPVEKNRKFAKYKLDELVTFRVPYYVGPLIDKTESNKNEKETKFAWMVRKAKGTITPWNFENLVDRTESANRFIKRMTSKDTYIIGEDVLPASSLLYEKYKVLNELNNIKVNKKKLDVEQKQHVYLDLFTTRKNVTKDDLATSLNCDVESITGLTDNKKFNSSLSSYIDLKAILGNIVDDYSKNEDLEKIIEYSTIFEDGNIYKEKLSEISWLTDEQIEKLSNIHFKGWGRLSKKLLTQITNENGERIIDTLWNTSNNFIQVISDESIQAKLAEINGEYANKYNLEDILDEAYTSPQNKKAIRQVMKVVEDIEKAMKCEPTSIAIEFTREKRKSKLTNTRYKKISETYEKITDELISEYELGKLQSELDSKVNNMRDRYYLYFMQLGRDMYTGEKMNIDELHQKYDIDHILPQSFIKDDSLNNRVLTSKSVNIKEKSDKTAADLYAAKMGDFWRKLRKQGLMTEQKYKNLLTRTDSINKYTKQSFIKRQLVETSQVVKLAANILQDKYRNTKIIEIRARLNSDLRKKYELIKNREVNDYHHAIDGYLTTFVGQYLYKVYPKLRSYFVYDDFKKLDSNYLKHMDKFNFIWKLEDKKAEDVYDKVNDEFVLNVPEMKEYIRKIYNYKYMLVSKEVTTKNGAFYDQTKYNAKTINLIPIKKDKPTNIYGGYKGKVSSYMMLVKIQKKKEVIYKFVGVPRLWTDELDRLIDTDEKKALLKK

SEQ ID NO: 33 - protein, 1064 aa, Rhodopseudomonas palustris
MSECVTRRILGIDLGIASCGWGVIEVGEASGSIIASGVRCFDAPLIDKTGEPKSATRRTARGQRRIIRRRRQRMNAVRRLLAEFGVLTGRSPDALHQALLRLSQSVAGSQVTPWTLRAAAHERKLTNDELAVVLGHIARHRGFRSNSKNDGGANAADETSKMKKAMETTREGLARYHSFGAMIASDPKFADRKRNRDKDYSHTAKRSDLEDEVRTIFRSQTRFGSLVASEKLSQAFADAAFFQRPLQDSEDMVGSCPFEPGQKRTARRAPSFELFRFLSRLANLKLTVGRAPERRLTPDEIALAAKGFGETKKSITFKSLREALDLDPNARFSGVAKEKESTLDVAARTGGAAYGTKTLKDALGDAPWRSLSRMPEKLDRIAEILSFREDMKAIRNGLEEVGLDGLVVDALMQATANGDFKDFTRAAHISALAARNIIPGLREGLVYSDACTRVGYDHAARPAVPLSQIGSPVTRKALSEALKQVRAVAREYGPIDYFHIELARSIGKSAEERKKLTDGIEARNVEKEKRRKEAAEHLGRAPSDDELLRYELAKEQNFKCIYSGDPIDPAGISANDTRYQVDHILPWSRFGDDSYVNKTLCTARSNQNKRGRTPFEWFDADKTEAEWMEYSARVEDLKEVKGRKKRNYSIKDAASVEDKFKARNLTDTQWATRLLADELKRMFPPRECERVVTVRADGGNDGLSIVEERRVFTRPGAITSKLRRAWGLEGLKKQDGKRVEDDRHHAVDALVLAATTESLLNRLTVEVQQREREGRQDDIFHCSQPWPGFRVDVQRTVYGSETMPGIFVSRAERRRARGKAHDATVKQIRDIDGERIVFERKPIEKLTDKDLERIPVPEPYGKAADPKKLRDELVENLRAWIAAGKPKDKPPRSPKGDIIRKVRIETKDKVAVEINGGTVDRGDMARVDVFRKKNKKGVWEFYVIPIYPHQIVASALPPNRAVIAYKAESEWTAIDGCFEFAWSLNPMSYLELVKSNGELIEGYFRSMDRTTGAINLSPMSTNSETIRSIGVKTLSSFRKFTVDRLGRKFEIPREVRTWRGEACT

SEQ ID NO: 34 - protein, 1166 aa, Nitrobacter hamburgensis
MHVEIDFPHFSRGDSHLAMNKNEILRGSSVLYRLGLDLGSNSLGWFVTHLEKRGDRHEPVALGPGGVRIFPDGRDPQSGTSNAVDRRMARGARKRRDRFVERRKELIAALIKYNLLPDDARERRALEVLDPYALRKTALTDTLPAHHVGRALFHLNQRRGFQSNRKTDSKQSEDGAIKQAASRLATDKGNETLGVFFADMHLRKSYEDRQTAIRAELVRLGKDHLTGNARKKIWAKVRKRLFGDEVLPRADAPHGVRARATITGTKASYDYYPTRDMLRDEFNAIWAGQSAHHATITDEARTEIEHIIFYQRPLKPAIVGKCTLDPATRPFKEDPEGYRAPWSHPLAQRFRILSEARNLEIRDTGKGSRRLTKEQSDLVVAALLANREVKFDKLRTLLKLPAEARFNLESDRRAALDGDQTAARLSDKKGFNKAWRGFPPERQIAIVARLEETEDENELIAWLEKECALDGAAAARVANTTLPDGHCRLGLRAIKKIVPIMQDGLDEDGVAGAGYHIAAKRAGYDHAKLPTGEQLGRLPYYGQWLQDAVVGSGDARDQKEKQYGQFPNPTVHIGLGQLRRVVNDLIDKYGPPTEISIEFTRALKLSEQQKAERQREQRRNQDKNKARAEELAKFGRPANPRNLLKMRLWEELAHDPLDRKCVYTGEQISIERLLSDEVDIDHILPVAMTLDDSPANKIICMRYANRHKRKQTPSEAFGSSPTLQGHRYNWDDIAARATGLPRNKRWRFDANAREEFDKRGGFLARQLNETGWLARLAKQYLGAVTDPNQIWVVPGRLTSMLRGKWGLNGLLPSDNYAGVQDKAEEFLASTDDMEFSGVKNRADHRHHAIDGLVTALTDRSLLWKMANAYDEEHEKFVIEPPWPTMRDDLKAALEKMVVSHKPDHGIEGKLHEDSAYGFVKPLDATGLKEEEAGNLVYRKAIESLNENEVDRIRDIQLRTIVRDHVNVEKTKGVALADALRQLQAPSDDYPQFKHGLRHVRILKKEKGDYLVPIANRASGVAYKAYSAGENFCVEVFETAGGKWDGEAVRRFDANKKNAGPKIAHAPQWRDANEGAKLVMRIHKGDLIRLDHEGRARIMVVHRLDAAAGRFKLADHNETGNLDKRHATNNDIDPFRWLMASYNTLKKLAAVPVRVDELGRVWRVMPN

SEQ ID NO: 35 - protein, 641 aa, Nitrobacter hamburgensis
MHKRNSRSYRLGLDLGSNSLGWFVTHLEKRGDRYEPVALDPGGVRIFPDGRDPQSGMSNAVDRRMARGARKRRDRFVDPYALRKAALTNALPAHRVGRAIFHLNQRRGFQSNRKTDRKQSEDGAIKQAASKLKARMHEEAAPTLGAFFADMHLRKSYDDQQTAIRAELVRLGKDHLTGNARKKVWAKVRKRLFGDEVLRPKDTSDGARARATTTGTKASYDFYPTRAMLLDEFNAIWAAQREHHLAMTDEAKAEIEHIIFYHRPLKPAIVGKCTLDPATRPFKEDPEGYRAPWSHPLAQRFRILSEARNLEIRETGKTSRRLTKDQSDLVVAALLANREVKFDKLRTLLKLPAEARFNLESDRRSTATRPPHGCRTRRASIRRGAGFLRNGRSRSSPDWKKPKTKTNCSHGSKWNAHLTAQRPRASPIRRCRTAIAGSACAQSKRSCRSCRTSSMRMALRAPAITSWPSVPATTIPVDTFQQGGNAFGRILSVVTIELFAITDRVDPVQEQDARCFALRIAECRSDGLQHFAEVSLGLPPRNAAQDQRHSAGLCQSSCVGRFVPGTPCRRTPRSTSLHGKEPSAHAFGSTARSRPQLPASPRPCMSFRDGTSSSPARMPETLDRCAISRSNRSSVCRAERL

SEQ ID NO: 36 - protein, 1368 aa, Streptococcus pyogenes
MDKKYSIGLDIGTNSVGWAVITDDYKVPSKKFKVLGNTDRHSIKKNLIGALLFDSGEIAEATRLKRTARRRYTRRKNRICYLQEIFSNEMAKVDDSFFHRLEESFLVEEDKKHERHPIFGNIVDEVAYHEKYPTIYHLRKKLVDSTDKADLRLIYLALAHMIKFRGHFLIEGDLNPDNSDVDKLFIQLVQTYNQLFEENPINASGVDAKAILSARLSKSRRLENLIAQLPGEKKNGLFGNLIALSLGLTPNFKSNFDLAEDAKLQLSKDTYDDDLDNLLAQIGDQYADLFLAAKNLSDAILLSDILRLNSEITKAPLSASMIKRYDEHHQDLTLLKALVRQQLPEKYKEIFFDQSKNGYAGYIDGGASQEEFYKFIKPILEKMDGTEELLAKLNREDLLRKQRTFDNGSIPHQIHLGELHAILRRQEDFYPFLKDNREKIEKILTFRIPYYVGPLARGNSRFAWMTRKSEETITPWNFEEVVDKGASAQSFIERMTNFDKNLPNEKVLPKHSLLYEYFTVYNELTKVKYVTEGMRKPAFLSGEQKKAIVDLLFKTNRKVTVKQLKEDYFKKIECFDSVEISGVEDRFNASLGTYHDLLKIIKDKDFLDNEENEDILEDIVLTLTLFEDREMIEERLKTYAHLFDDKVMKQLKRRRYTVWGRLSRKLINGIRDKQSGKTILDFLKSDGFANRNFMQLIHDDSLTFKEDIQKAQVSGQGDSLHEHIANLAGSPAIKKGILQTVKVVDELVKVMGRHKPENIVIEMARENQTTQKGQKNSRERMKRIEEGIKELGSQILKEHPVENTQLQNEKLYLYYLQNGRDMYVDQELDINRLSDYDVDHIVPQSFIKDDSIDNKVLTRSDKNRGKSDNVPSEEVVKKMKNYWRQLLNAKLITQRKFDNLTKAERGGLSELDKAGFIKRQLVETRQITKHVAQILDSRMNTKYDENDKLIREVKVITLKSKLVSDFRKDFQFYKVREINNYHHAHDAYLNAVVGTALIKKYPKLESEFVYGDYKVYDVRKMLAKSEQEIGKATAKYFFYSNIMNFFKTEITLANGEIRKRPLIETNGETGEIVWDKGRDFATVRKVLSMPQVNIVKKTEVQTGGFSKESILPKRNSDKLIARKKDWDPKKYGGFDSPTVAYSVLVVAKVEKGKSKKLKSVKELLGITIMERSSFEKNPIDFLEAKGYKEVRKDLIIKLPKYSLFELENGRKRMLASAGELQKGNELALPSKYVNFLYLASHYEKLKGSPEDNEQKQLFVEQHKHYLDEIIEQISEFSKRVILADANLDKVLSAYNKHRDKPIREQAENIIHLFTLTNLGAPTAFKYFDTTIDRKRYTSTKEVLDATFIHQSITGLYETRIDLSQLGGD

SEQ ID NO: 37 - protein, 1368 aa, Streptococcus pyogenes
MDKKYSIGLDIGTNSVGWAVITDDYKVPSKKFKVLGNTDRHSIKKNLIGALLFDSGETAEATRLKRTARRRYTRRKNRICYLQEIFSNEMAKVDDSFFHRLEESFLVEEDKKHERHPIFGNIVDEVAYHEKYPTIYHLRKKLVDSTDKADLRLIYLALAHMIKFRGHFLIEGDLNPDNSDVDKLFIQLVQTYNQLFEENPINASGVDAKAILSARLSKSRRLENLIAQLPGEKKNGLFGNLIALSLGLTPNFKSNFDLAEDAKLQLSKDTYDDDLDNLLAQIGDQYADLFLAAKNLSDAILLSDILRLNSEITKAPLSASMIKRYDEHHQDLTLLKALVRQQLPEKYKEIFFDQSKNGYAGYIDGGASQEEFYKFIKPILEKMDGTEELLAKLNREDLLRKQRTFDNGSIPHQIHLGELHAILRRQEDFYPFLKDNREKIEKILTFRIPYYVGPLARGNSRFAWMTRKSEETITPWNFEEVVDKGASAQSFIERMTNFDKNLPNEKVLPKHSLLYEYFTVYNELTKVKYVTEGMRKPAFLSGEQKKAIVDLLFKTNRKVTVKQLKEDYFKKIECFDSVEISGVEDRFNASLGTYHDLLKIIKDKDFLDNEENEDILEDIVLTLTLFEDREMIEERLKTYAHLFDDKVMKQLKRRRYTGWGRLSRKLINGIRDKQSGKTILDFLKSDGFANRNFMQLIHDDSLTFKEDIQKAQVSGQGDSLHEHIANLAGSPAIKKGILQTVKVVDELVKVMGRHKPENIVIEMARENQTTQKGQKNSRERMKRIEEGIKELGSQILKEHPVENTQLQNEKLYLYYLQNGRDMYVDQELDINRLSDYDVDHIVPQSFIKDDSIDNKVLTRSDKNRGKSDNVPSEEVVKKMKNYWRQLLNAKLITQRKFDNLTKAERGGLSELDKAGFIKRQLVETRQITKHVAQILDSRMNTKYDENDKLIREVKVITLKSKLVSDFRKDFQFYKVREINNYHHAHDAYLNAVVGTALIKKYPKLESEFVYGDYKVYDVRKMIAKSEQEIGKATAKYFFYSNIMNFFKTEITLANGEIRKRPLIETNGETGEIVWDKGRDFATVRKVLSMPQVNIVKKTEVQTGGFSKESILPKRNSDKLIARKKDWDPKKYGGFDSPTVAYSVLVVAKVEKGKSKKLKSVKELLGLTIMERSSFEKNPIDFLEAKGYKEVKKDLIIKLPKYSLFELENGRKRMLASAGELQKGNELALPSKYVNFLYLASHYEKLKGSPEDNEQKQLFVEQHKHYLDEIIEQISEFSKRVILADANLDKVLSAYNKHRDKPIREQAENIIHLFTLTNLGAPAAFKYFDTTIDRKRYTSTKEVLDATLIHQSITGLYETRIDLSQLGGD

SEQ ID NO: 38 - protein, 1368 aa, Streptococcus pyogenes
MDKKYSIGLDIGTNSVGWAVITDDYKVPSKKFKVLGNTDRHSIKKNLIGALLFDSGEIAEATRLKRTARRRYTRRKNRICYLQEIFSNEMAKVDDSFFHRLEESFLVEEDKKHERHPIFGNIVDEVAYHEKYPTIYHLRKKLVDSTDKADLRLIYLALAHMIKFRGHFLIEGDLNPDNSDVDKLFIQLVQTYNQLFEENPINASGVDAKAILSARLSKSRRLENLIAQLPGEKKNGLFGNLIALSLGLTPNFKSNFDLAEDAKLQLSKDTYDDDLDNLLAQIGDQYADLFLAAKNLSDAILLSDILRLNSEITKAPLSASMIKRYDEHHQDLTLLKALVRQQLPEKYKEIFFDQSKNGYAGYIDGGASQEEFYKFIKPILEKMDGTEELLAKLNREDLLRKQRTFDNGSIPHQIHLGELHAILRRQEDFYPFLKDNREKIEKILTFRIPYYVGPLARGNSRFAWMTRKSEETITPWNFEEVVDKGASAQSFIERMTNFDKNLPNEKVLPKHSLLYEYFTVYNELTKVKYVTEGMRKPAFLSGEQKKAIVDLLFKTNRKVTVKQLKEDYFKKIECFDSVEISGVEDRFNASLGTYHDLLKIIKDKDFLDNEENEDILEDIVLTLTLFEDREMIEERLKTYAHLFDDKVMKQLKRRRYTGWGRLSRKLINGIRDKQSGKTILDFLKSDGFANRNFMQLIHDDSLTFKEDIQKAQVSGQGDSLHEHIANLAGSPAIKKGILQTVKVVDELVKVMGRHKPENIVIEMARENQTTQKGQKNSRERMKRIEEGIKELGSQILKEHPVENTQLQNEKLYLYYLQNGRDMYVDQELDINRLSDYDVDHIVPQSFIKDDSIDNKVLTRSDKNRGKSDNVPSEEVVKKMKNYWRQLLNAKLITQRKFDNLTKAERGGLSELDKAGFIKRQLVETRQITKHVAQILDSRMNTKYDENDKLIREVKVITLKSKLVSDFRKDFQFYKVREINNYHHAHDAYLNAVVGTALIKKYPKLESEFVYGDYKVYDVRKMLAKSEQEIGKATAKYFFYSNIMNFFKTEITLANGEIRKRPLIETNGETGEIVWDKGRDFATVRKVLSMPQVNIVKKTEVQTGGFSKESILPKRNSDKLIARKKDWDPKKYGGFDSPTVAYSVLVVAKVEKGKSKKLKSVKELLGITIMERSSFEKNPIDFLEAKGYKEVRKDLIIKLPKYSLFELENGRKRMLASAGELQKGNELALPSKYVNFLYLASHYEKLKGSPEDNEQKQLFVEQHKHYLDEIIEQISEFSKRVILADANLDKVLSAYNKHRDKPIREQAENIIHLFTLTNLGAPTAFKYFDTTIDRKRYTSTKEVLDATFIHQSITGLYETRIDLSQLGGD

SEQ ID NO: 39 - protein, 1371 aa, Streptococcus pyogenes
MDKKYSIGLDIGTNSVGWAVITDDYKVPSKKFKVLGNTDRHSIKKNLIGALLFDSGETAEATRLKRTARRRYTRRKNRICYLQEIFSNEMAKVDDSFFHRLEESFLVEEDKKHERHPIFGNIVDEVAYHEKYPTIYHLRKKLADSTDKADLRLIYLALAHMIKFRGHFLIEGDLNPDNSDVDKLFIQLVQTYNQLFEENPINASRVDAKAILSARLSKSRRLENLIAQLPGEKKNGLFGNLIALSLGLTPNFKSNFDLAEDAKLQLSKDTYDDDLDNLLAQIGDQYADLFLAAKNLSDATLLSDILRVNSEITKAPLSASMIKRYDEHHQDLTLLKALVRQQLPEKYKEIFFDQSKNGYAGYIDGGASQEEFYKFIKPILEKMDGTEELLAKLNREDLLRKQRTFDNGSIPHQIHLGELHAILRRQEDFYPFLKDNREKIEKILTFRIPYYVGPLARGNSRFAWMTRKSEETITPWNFEEVVDKGASAQSFIERMTNFDKNLPNEKVLPKHSLLYEYFTVYNELTKVKYVTEGMRKPAFLSGEQKKAIVDLLFKTNRKVTVKQLKEDYFKKIECFDSVEISGVEDRFNASLGTYHDLLKIIKDKDFLDNEENEDILEDIVLTLTLFEDKEMIEERLKTYAHLFDDKVMKQLKRRHYTGWGRLSRKLINGIRDKQSGKTILDFLKSDGFANRNFIQLIHDDSLTFKEAIQKAQVSGQGHSLHEQIANLAGSPAIKKGILQSVKVVDELVKVMGHKPENIVIEMARENQTTQKGQKNSRERMKRIEEGIKELGSQILKEHPVENTQLQNEKLYLYYLQNGRDMYVDQELDINRLSDYDVDHIVPQSFIKDDSIDNKVLTRSDKNRGKSDDVPSEEVVKKMKNYWRQLLNAKLITQRKFDNLTKAERGGLSELDKAGFIKRQLVETRQITKHVAQILDSRMNTKYDENDKLIREVKVITLKSKLVSDFRKDFQFYKVREINNYHHAHDAYLNAVVGTALIKKYPKLESEFVYGDYKVYDVRKMIAKSEQEIGKATAKRFFYSNIMNFFKTEITLANGEIRKRPLIETNEETGEIVWDKGRDFATVRKVLSMPQVNIVKKTEVQTGALTNESIYARGSFDKLISRKHRFESSKYGGFGSPTVTYSVLVVAKSKVQDGKVKKIKTGKELIGITLLDKLVFEKNPLKFIEDKGYGNVQIDKCIKLPKYSLFEFENGTRRMLASVMANNNSRGDLQKANEMFLPAKLVTLLYHAHKIESSKELEHEAYILDHYNDLYQLLSYIERFASLYVDVEKNISKVKELFSNIESYSISEICSSVINLLTLTASGAPADFKFLGTTIPRKRYGSPQSILSSTLIHQSITGLYETRIDLSQLGSD

SEQ ID NO: 40 - protein, 1121 aa, Streptococcus thermophilus
MSDLVLGLDIGIGSVGVGILNKVTGEIIHKNSRIFPAAQAENNLVRRTNRQGRRLARRKKHRRVRLNRLFEESGLITDFTKISINLNPYQLRVKGLTDELSNEELFIALKNMVKHRGISYLDDASDDGNSSVGDYAQIVKENSKQLETKTPGQIQLERYQTYGQLRGDFTVEKDGKKHRLINVFPTSAYRSEALRILQTQQEFNPQITDEFINRYLEILTGKRKYYHGPGNEKSRTDYGRYRTSGETLDNIFGILIGKCTFYPDEFRAAKASYTAQEFNLLNDLNNLTVPTETKKLSKEQKNQIINYVKNEKAMGPAKLFKYIAKLLSCDVADIKGYRIDKSGKAEIHTFEAYRKMKTLETLDIEQMDRETLDKLAYVLTLNTEREGIQEALEHEFADGSFSQKQVDELVQFRKANSSIFGKGWHNFSVKLMMELIPELYETSEEQMTILTRLGKQKTTSSSNKTKYIDEKLLTEEIYNPVVAKSVRQAIKIVNAAIKEYGDFDNIVIEMARETNEDDEKKAIQKIQKANKDEKDAAMLKAANQYNGKAELPHSVFHGHKQLATKIRLWHQQGERCLYTGKTISIHDLINNSNQFEVDHILPLSITFDDSLANKVLVYATANQEKGQRTPYQALDSMDDAWSFRELKAFVRESKTLSNKKKEYLLTEEDISKFDVRKKFIERNLVDTRYASRVVLNALQEHFRAHKIDTKVSVVRGQFTSQLRRHWGIEKTRDTYHHHAVDALIIAASSQLNLWKKQKNTLVSYSEDQLLDIETGELISDDEYKESVFKAPYQHFVDTLKSKEFEDSILFSYQVDSKFNRKISDATIYATRQAKVGKDKADETYVLGKIKDIYTQDGYDAFMKIYKKDKSKFLMYRHDPQTFEKVIEPILENYPNKQINEKGKEVPCNPFLKYKEEHGYIRKYSKKGNGPEIKSLKYYDSKLGNHIDITPKDSNNKVVLQSVSPWRADVYFNKTTGKYEILGLKYADLQFEKGTGTYKISQEKYNDIKKKEGVDSDSEFKFTLYKNDLLLVKDTETKEQQLFRFLSRTMPKQKHYVELKPYDKQKFEGGEALIKVLGNVANSGQCKKGLGKSNISIYKVRTDVLGNQHIIKNEGDKPKLDF

SEQ ID NO: 41 - protein, 1388 aa, Streptococcus thermophilus
MTKPYSIGLDIGTNSVGWAVTTDNYKVPSKKMKVLGNTSKKYIKKNLLGVLLFDSGITAEGRRLKRTARRRYTRRRNRILYLQEIFSTEMATLDDAFFQRLDDSFLVPDDKRDSKYPIFGNLVEEKAYHDEFPTIYHLRKYLADSTKKADLRLVYLALAHMIKYRGHFLIEGEFNSKNNDIQKNFQDFLDTYNAIFESDLSLENSKQLEEIVKDKISKLEKKDRILKLFPGEKNSGIFSEFLKLIVGNQADFRKCFNLDEKASLHFSKESYDEDLETLLGYIGDDYSDVFLKAKKLYDAILLSGFLTVTDNETEAPLSSAMIKRYNEHKEDLALLKEYIRNISLKTYNEVFKDDTKNGYAGYIDGKTNQEDFYVYLKKLLAEFEGADYFLEKIDREDFLRKQRTFDNGSIPYQIHLQEMRAILDKQAKFYPFLAKNKERIEKILTFRIPYYVGPLARGNSDFAWSIRKRNEKITPWNFEDVIDKESSAEAFINRMTSFDLYLPEEKVLPKHSLLYETFNVYNELTKVRFIAESMRDYQFLDSKQKKDIVRLYFKDKRKVTDKDIIEYLHAIYGYDGIELKGIEKQFNSSLSTYHDLLNIINDKEFLDDSSNEAIIEEIIHTLTIFEDREMIKQRLSKFENIFDKSVLKKLSRRHYTGWGKLSAKLINGIRDEKSGNTILDYLIDDGISNRNFMQLIHDDALSFKKKIQKAQIIGDEDKGNIKEVVKSLPGSPAIKKGILQSIKIVDELVKVMGGRKPESIVVEMARENQYTNQGKSNSQQRLKRLEKSLKELGSKILKENIPAKLSKIDNNALQNDRLYLYYLQNGKDMYTGDDLDIDRLSNYDIDHIIPQAFLKDNSIDNKVLVSSASNRGKSDDVPSLEVVKKRKTFWYQLLKSKLISQRKFDNLTKAERGGLSPEDKAGFIQRQLVETRQITKHVARLLDEKFNNKKDENNRAVRTVKIITLKSTLVSQFRKDFELYKVREINDFHHAHDAYLNAVVASALLKKYPKLEPEFVYGDYPKYNSFRERKSATEKVYFYSNIMNIFKKSISLADGRVIERPLIEVNEETGESVWNKESDLATVRRVLSYPQVNVVKKVEEQNHGLDRGKPKGLFNANLSSKPKPNSNENLVGAKEYLDPKKYGGYAGISNSFTVLVKGTIEKGAKKKITNVLEFQGISILDRINYRKDKLNFLLEKGYKDIELIIELPKYSLFELSDGSRRMLASILSTNNKRGEIHKGNQIFLSQKFVKLLYHAKRISNTINENHRKYVENHKKEFEELFYYILEFNENYVGAKKNGKLLNSAFQSWQNHSIDELCSSFIGPTGSERKGLFELTSRGSAADFEFLGVKIPRYRDYTPSSLLKDATLIHQSVTGLYETRIDLAKLGEG

SEQ ID NO: 42 - protein, 1138 aa, Acidothermus cellulolyticus
MGGSEVGTVPVTWRLGVDVGERSIGLAAVSYEEDKPKEILAAVSWIHDGGVGDERSGASRLALRGMARRARRLRRFRRARLRDLDMLLSELGWTPLPDKNVSPVDAWLARKRLAEEYVVDETERRRLLGYAVSHMARHRGWRNPWTTIKDLKNLPQPSDSWERTRESLEARYSVSLEPGTVGQWAGYLLQRAPGIRLNPTQQSAGRRAELSNATAFETRLRQEDVLWELRCIADVQGLPEDVVSNVIDAVFCQKRPSVPAERIGRDPLDPSQLRASRACLEFQEYRIVAAVANLRIRDGSGSRPLSLEERNAVIEALLAQTERSLTWSDIALEILKLPNESDLTSVPEEDGPSSLAYSQFAPFDETSARIAEFIAKNRRKIPTFAQWWQEQDRTSRSDLVAALADNSIAGEEEQELLVHLPDAELEALEGLALPSGRVAYSRLTLSGLTRVMRDDGVDVHNARKTCFGVDDNWRPPLPALHEATGHPVVDRNLAILRKFLSSATMRWGPPQSIVVELARGASESRERQAEEEAARRAHRKANDRIRAELRASGLSDPSPADLVRARLLELYDCHCMYCGAPISWENSELDHIVPRTDGGSNRHENLAITCGACNKEKGRRPFASWAETSNRVQLRDVIDRVQKLKYSGNMYWTRDEFSRYKKSVVARLKRRTSDPEVIQSIESTGYAAVALRDRLLSYGEKNGVAQVAVFRGGVTAEARRWLDISIERLFSRVAIFAQSTSTKRLDRRHHAVDAVVLTTLTPGVAKTLADARSRRVSAEFWRRPSDVNRHSTEEPQSPAYRQWKESCSGLGDLLISTAARDSIAVAAPLRLRPTGALHEETLRAFSEHTVGAAWKGAELRRIVEPEVYAAFLALTDPGGRFLKVSPSEDVLPADENRHIVLSDRVLGPRDRVKLFPDDRGSIRVRGGAAYIASFHHARVFRWGSSHSPSFALLRVSLADLAVAGLLRDGVDVFTAELPPWTPAWRYASIALVKAVESGDAKQVGWLVPGDELDFGPEGVTTAAGDLSMFLKYFPERHWVVTGFEDDKRINLKPAFLSAEQAEVLRTERSDRPDTLTEAGEILAQFFPRCWRATVAKVLCHPGLTVIRRTALGQPRWRRGHLPYSWRPWSADPWSGGTP

SEQ ID NO: 43 - protein, 1629 aa, Francisella novicida
MNFKILPIAIDLGVKNTGVFSAFYQKGTSLERLDNKNGKVYELSKDSYTLLMNNRTARRHQRRGIDRKQLVKRLFKLIWTEQLNLEWDKDTQQAISFLFNRRGFSFITDGYSPEYLNIVPEQVKAILMDIFDDYNGEDDLDSYLKLATEQESKISEIYNKLMQKILEFKLMKLCTDIKDDKVSTKTLKEITSYEFELLADYLANYSESLKTQKFSYTDKQGNLKELSYYHHDKYNIQEFLKRHATINDRILDTLLTDDLDIWNFNFEKFDFDKNEEKLQNQEDKDHIQAHLHHFVFAVNKIKSEMASGGRHRSQYFQEITNVLDENNHQEGYLKNFCENLHNKKYSNLSVKNLVNLIGNLSNLELKPLRKYFNDKIHAKADHWDEQKFTETYCHWILGEWRVGVKDQDKKDGAKYSYKDLCNELKQKVTKAGLVDFLLELDPCRTIPPYLDNNNRKPPKCQSLILNPKFLDNQYPNWQQYLQELKKLQSIQNYLDSFETDLKVLKSSKDQPYFVEYKSSNQQIASGQRDYKDLDARILQFIFDRVKASDELLLNEIYFQAKKLKQKASSELEKLESSKKLDEVIANSQLSQILKSQHTNGIFEQGTFLHLVCKYYKQRQRARDSRLYIMPEYRYDKKLHKYNNTGRFDDDNQLLTYCNHKPRQKRYQLLNDLAGVLQVSPNFLKDKIGSDDDLFISKWLVEHIRGFKKACEDSLKIQKDNRGLLNHKINIARNTKGKCEKEIFNLICKIEGSEDKKGNYKHGLAYELGVLLFGEPNEASKPEFDRKIKKFNSIYSFAQIQQIAFAERKGNANTCAVCSADNAHRMQQIKITEPVEDNKDKIILSAKAQRLPAIPTRIVDGAVKKMATILAKNIVDDNWQNIKQVLSAKHQLHIPIITESNAFEFEPALADVKGKSLKDRRKKALERISPENIFKDKNNRIKEFAKGISAYSGANLTDGDFDGAKEELDHIIPRSHKKYGTLNDEANLICVTRGDNKNKGNRIFCLRDLADNYKLKQFETTDDLEIEKKIADTIWDANKKDFKFGNYRSFINLTPQEQKAFRHALFLADENPIKQAVIRAINNRNRTFVNGTQRYFAEVLANNIYLRAKKENLNTDKISFDYFGIPTIGNGRGIAEIRQLYEKVDSDIQAYAKGDKPQASYSHLIDAMLAFCIAADEHRNDGSIGLEIDKNYSLYPLDKNTGEVFTKDIFSQIKITDNEFSDKKLVRKKAIEGFNTHRQMTRDGIYAENYLPILIHKELNEVRKGYTWKNSEEIKIFKGKKYDIQQLNNLVYCLKFVDKPISIDIQISTLEELRNILTTNNIAATAEYYYINLKTQKLHEYYIENYNTALGYKKYSKEMEFLRSLAYRSERVKIKSIDDVKQVLDKDSNFIIGKITLPFKKEWQRLYREWQNTTIKDDYEFLKSFFNVKSITKLHKKVRKDFSLPISTNEGKFLVKRKTWDNNFIYQILNDSDSRADGTKPFIPAFDISKNEIVEAIIDSFTSKNIFWLPKNIELQKVDNKNIFAIDTSKWFEVETPSDLRDIGIATIQYKIDNNSRPKVRVKLDYVIDDDSKINYFMNHSLLKSRYPDKVLEILKQSTIIEFESSGFNKTIKEMLGMKLAGIYNETSNN

SEQ ID NO: 44 - protein, 1068 aa, Verminephrobacter eiseniae
MNKAVAYRLALDLGSTSLGWAIFRLNEAREPTAIIRAGVRIFSDGRNANSEPLAVHRRVARAMRRRRDRLLKRKKRMHDQLVQHGFFPAEVAERKELERLNPYQLRAKGLHEALTPGEFARALFHINQRRGFKSNRKTDRKDNDSGALKQAISELRKRIQDSDCATAGEWFWKERMQQKPEGVRGQWVRARYRKTPSTTDEGKKRIGYDLYVDRAMVEQEFDALWAAQAALQPGLFTEAARAELKDTLLYQRDLRPVKPGRCTLLPAEERAPLALPSTQRFRILQEVNNLRLLDEALREVPLNLAQRDAVVSALEGKKELSFAAIRKLLTLSGKFNLEDEKRAELKGNATSVILARKDLFGDAWAGFDAAVQDEIVWRLVSQESEGALIAWLQQHTGVDGVCAEAIVNTRLPDGYGRLSRKALERIVPALQREVCTYDKAVQAAGFAHHSDLGFDFDYAEDEVQQVGEHTIASTGEVQAQYAFKQLPYYGKALQRHVAFGSGDAKDHEEKCYGKIANPTVHIGLNQVRTVVNALIRRYGHPTEVVVELARDLKQSREQKQQTQREQADNQKRNEDIRKRIAPILETSPERVRDRDIKKWILWEELNKKDIADRHCPYSGERISATMLLSEAVEIEHILPFSRTLDDSLNNRTVAMRRANRIKGDRTPWEARADFEAQGWRYEAILQRAEGMPPRKRYRFAEDGYQRWLGKDRNFLARALNDTSYLSRLAANYLRLVCPQGVRVIPGQMTDKLRGKFGLNSVLGLDGKKNRNDHRHHAVDACVIGVTDQGLMQRFANASKQARENGLTRLVQDMLLPWWPSYYDHVERAVRHIRVSHRPDHGFEGAMMKGTAHGIREDGIREDGRIKQRPKAKGSADHKTITLIPIDEPRQLARHGVDAEGKPLPYKGYASGSNYCIEITKNGKGKWEGQVISTFDAYRIKAAADAAARAGQVISTVEADSIVRKSGWERLRGAQSQNGQPLVMRLVIGDSVRMEVDGRDEVMRVVKMSGKEMVFAPVREANVDKRNNMPDEQDPFTYTYKRADQLRKAKARQVTISPIGELRDPGFKG

SEQ ID NO: 45 - protein, 1125 aa, Francisella tularensis
MNVKILPIAIDLDVKNTGVFSAFYQKGTSLEKLDNKNGKVYELSKDSYTLLMNNRTARRHQRRGIDRKQLVKRLFKLVWTEQLNLEWDKDTQQAISFLFNRRGFSFITDGYSTEYLNIVPEQVKAILMDIFDDYNGEDDLDSYLKLATEQESKISEIYNKLMQKILEFKLRKLCTDIKDDKVSTKTLKEITSYEFELLADYLANYSESLKIQKFSYTDKQGNLKELSYYHHDKYNIQEFLKRHATINDEILDTLLTDDFDIWNFNFEKFDFDKNEEKLQNQEDKDHTQAHLHHFVFAVNKIKSEMASGGRHRSQYFQEITNVLDENNHQEGYLKNFCENLHNKKYSNLSVKNLVNLVGNLSNLELKPLRKYFNDKIHAKADHWDEQKFTETYCHWILGEWRVGVKDQDKKDGAKYSYKDLCNELKQKVTKAGLIDFLLELDPCRTIPPYLDNNNRKPPKCQSLILNPKFLDNQYPNWQQYLQELKKLQSIQDYLDSFETDLKDLKSSKDQPYFVEYKSSNQQMASGQRDYKDLDARILQFIFDRVKASDELLLNEIYFQAKKLKQKASSELEKLESSKKLDEVIANSQLSQILKSQHTNGIFEQGTFLHLVCKYYKQRQRARDSRLYIMPEYRYDKKLDKYNNTGRFDDNNQLLTYCNHKPRQKRYQLLNDLAGVLQVSRNQLLSSVEEWFQQAQRVGEISKSQDEQIFEWLKSFKIASYCKAAVEMQKQYRGTLKNAIQTAIFRQSENINKNKNKNTGNQQQALSENSKDVKSLTADEKKLLKLIENIAKASQKIGESLGLNDKQIKKFNSIYSFAQIQQIAFAERKGNANTCAVCSADNAHRMQQIKITELVEDNKDNIILSAKAQRLPAIPTRIVDGAVKKMATILAKNIVDDNWQNIKQVLSAKHQLHIPIITESNAFEFEPALADVKGKSLKDRRKKALERISPENIFKDKNNRIKEFAKGISAYSGANLTDGDFDGAKEELDHIIPRSHKKYGTLNDEANLICVTRDDNKNIFAIDTSKWFEIETPSDLRDIGVATIQYKIDNNSRPKVRVKLDYVIDDDSKINYFMNHSLLKSRYPDKVLEILKQSTIIEFESSGFNKTIKEMLGMTLAGIYNETSNN

SEQ ID NO: 46 - protein, 1064 aa, Bradyrhizobium sp.
MKRTSLRAYRLGVDLGANSLGWFVVWLDDHGQPEGLGPGGVRIFPDGRNPQSKQSNAAGRRLARSARRRRDRYLQRRGKLMGLLVKHGLMPADEPARKRLECLDPYGLRAKALDEVLPLHHVGRALFHLNQRRGLFANRAIEQGDKDASAIKAAAGRLQTSMQACGARTLGEFLNRRHQLRATVRARSPVGGDVQARYEFYPTRAMVDAEFEAIWAAQAPHHPTMTAEAHDTIREAIFSQRAMKRPSIGKCSLDPATSQDDVDGFRCAWSHPLAQRFRIWQDVRNLAVVETGPTSSRLGKEDQDKVARALLQTDQLSFDEIRGLLGLPSDARFNLESDRRDHLKGDATGAILSARRHFGPAWHDRSLDRQIDIVALLESALDEAAIIASLGTTHSLDEAAAQRALSALLPDGYCRLGLRAIKRVLPLMEAGRTYAEAASAAGYDHALLPGGKLSPTGYLPYYGQWLQNDVVGSDDERDTNERRWGRLPNPTVHIGIGQLRRVVNELIRWHGPPAEITVELTRDLKLSPRRLAELEREQAENQRKNDKRTSLLRKLGLPASTHNLLKLRLWDEQGDVASECPYTGEAIGLERLVSDDVDIDHLIPFSISWDDSAANKVVCMRYANREKGNRTPFEAFGHRQGRPYDWADIAERAARLPRGKRWRFGPGARAQFEELGDFQARLLNETSWLARVAKQYLAAVTHPHRIHVLPGRLTALLRATWELNDLLPGSDDRAAKSRKDHRHHAIDALVAALTDQALLRRMANAHDDTRRKIEVLLPWPTFRIDLETRLKAMLVSHKPDHGLQARLHEDTAYGTVEHPETEDGANLVYRKTFVDISEKEIDRIRDRRLRDLVRAHVAGERQQGKTLKAAVLSFAQRRDIAGHPNGIRHVRLTKSIKPDYLVPIRDKAGRIYKSYNAGENAFVDILQAESGRWIARATTVFQANQANESHDAPAAQPIMRVFKGDMLRIDHAGAEKFVKIVRLSPSNNLLYLVEHHQAGVFQTRHDDPEDSFRWLFASFDKLREWNAELVRIDTLGQPWRRKRGLETGSEDATRIGWTRPKKWP

SEQ ID NO: 47 - protein, 1354 aa, Flavobacterium psychrophilum
MKKILGLDLGTNSIGWAFINEAENEIEVSSIVNTGVRIVPLTTDEESDFKKGNTISINADRTLKRGARRGLQRFKQRREALLETFNRIKFIATDFVYAETGAATTFSSYQLRAKSAVEAVTKEELVKVLLMLNKKRGYKSSRKAKTAEEGDAIDGMKIAKEIFENNLTPGQWVYNSLSKGGKFIPDFYHSDLQKELEKIVRFQNQFHSEQINDKLLADIQGKSRTQTSQHFSKTLNIPLAENKGTREETKLQHYQWRNEALANELDMKILAFIITEINNQINQSSGYLGAISDRSKELYFNQETVGQYQYKQLQENVHAKLKNQVFYRQDYLDEFEKIWETQAKFHSELNEKLKAEIRDITIFYQRKLKSQKHLVSFCEFEKGHKAIPKSSPLFQEFRIWQNLNNVVVKNETTKEVFELSEELKQLIAEELQFKESMTDVQMLTFCELKKGTHTVNFKKIEGNRTNTSIYKAFEKILEVEGYEIDFSKMKPLEIKETVAPIFETLNINTVILDFDPTIQGNDFDKQPYYQLWHLLYSAEDDDKLKETLKTKFGFKENHLPFILNINLQADYGSLSAKAIKKILPHLMDGHIYDKACLMVGYNHSSSLTTAQNNDRVLKDTLELLKKNSLRNPVVEKILNQMINVINAIMKDPAMGKPDEIRVELARELKANNEQRKKATSDINTATTEHERIRKLLHSEFNIPRVTRNDIIRYKLWLETGGISLYTGNPIKASDLFSKNYDIEHIIPKSRLFDDSFSNKTLCERQLNIDKSNKTAYSFLQEKLSENDFAAYENRVKDLFKTGKIKSYTKYKKLLMADNEIPEGFIDRQLRETQYIAKKAKEILLEVSRNVTATIGSVTDKLRQDWELVDVMKELNWEKYDKLGLTHIEEGKNGERLSKIKDWTKRNDHRHHAMDAITVAFTKPAYIQYLNNLNAKTQGENKANSIIGIENKHLYRDKNNKLRFISPMKNFREEAKKQLESILISYKAKNKVVTKNKNTTKKSGGTNQKIQLTPRGRLHKETVYGKLQQYATKEEKVNASFTEDYIQKVAKKEYREALLKRLEENDNDPKKAFTGKNALNKTPIYISLKDNIIVPEKVKTVWLETDYTIRKDITPDLKIDKVIDVGIKRILQNRLNEFNGDPKKAFVNLGESPIWLNKEKGIAIKRVTISGVSNAQALHTKKDHLGNEILDKNGNPIPVDFISTGNNHHVAIYRDEKGNLQEEVVSFYDAVIRRNLGLSVINKNHEKGWEFLFSMKQNEFFIFPSDGFNPHEIDLLNPNNYHLISPNIFRVQKISTKNYMFNHHLETKAVDGEMLKSKKELSKTSYHFIQTPTNLNGIIKVRINHLGKIVHLGEY

SEQ ID NO: 48 - protein, 1062 aa, Actinobacillus succinogenes
MNLNYILGLDLGIASVGWAVVEIDEQENPQRLIDVGVRTFDRAEVLKTGESLALARRLARSSRRLVKRRAERIKKAKRLLKAENLLLSADEILPNEAWQLRVKGLDQKLERQEWAAVLLHLLKHRGYLSQRKNESKSENKELGALLSGVAINHQILQSAEYRTPAEIAVNKFQAEEGHIRNQRGAYTHTFSRLDLLAEMELLFQRQATLGNPHTSTKLLENLTALLMWQKPALAGEAILKMLGKCTFEPTEYKAAKNSYSAERFVWLTKLNNLRILEQGAERALTDNERFALLDQPYEKAKLTYAQVRTLLGLSDEAIFKGLRYQGEDKKAVETKTTLMEVKAYHQIRKALEGLDLKAEWNELKNNPALLDEIGTAFSLYKTDDDIHRYLDGKLSESVLNALLENLNFDKFIQLSLKALQQILPLMLQGQRYDEAVSAIYGDHYGKKSDEIDRLLPNIPTDEIRNPVVLRTLTQARKVINAVVRLYGSPARIHIETGREVGKSYQDRKKLEKQQEENRKQRENAVKKFKEYFPNFVGEPKGKDILKMRLYELQQAKCLYSGKSLELYRLLEKGYVEVDHALPFSRTWDDSFNNKVLVLANENQNKGNATPYEWLDGKNNSEGWQHFVARVQTSGFSYAKKQRVLIQELDEKSFIERNLNDTRYVARFLCNHIADNMLLTGKGKRKVFASNGQITALLRGCWGLQKVRENNDRHHALDAVVVACSTKSMQDKITKFVKYKEGRLFKDKKDGVYKGERINRETGEIISLHFPTPWKFFKENVEIRIFSENPKLELENRLPDYPQYNHEFVQPLFVSRMPTRKMTGQGHMETVKSAKRLDKGLSVLKVPLTQLKLSDLERMVNREREMALYEALKECLEQFGNDPAKAFAEPFYKKGGALVKAVRVEQTQKSGVLVRNGNGVADNATGSIVRVDVFTKGGKYFLVPIYTWQVAKGILPNKAVIQGKDESEWEEMDENAVFQFSMHKNDLIKVKTKKGEIFGYFNGLDRATGSIEIEEHDLEKSKGKNGSHRGLGVKTAFFLEKYQVDELGKNIRPCRPTKRQHVR

SEQ ID NO: 49 - protein, 1340 aa, Dorea longicatena
MEQEYYLGLDMGTGSVGWAVTDSEYHVLRKHGKALWGVRLFESASTAEERRMFRTSRRRLDRRNWRIEILQEIFAEEISKKDPGFFLRMKESKYYPEDKRDINGNCPELPYALFVDDDFTDKDYHKKFPTIYHLRKMLMNTEETPDIRLVYLAIHHMMKHRGHFLLSGDINEIKEFGTTFSKLLENIKNEELDWNLELGKEEYAVVESILKDNMLNRSTKKTRLIKALKAKSICEKAVLNLLAGGTVKLSDIFGLEELNETERPKISFADNGYDDYIGEVENELGEQFYIIETAKAVYDWAVLVEILGKYTSISEAKVATYEKHKSDLQFLKKIVRKYLTKEEYKDIFVSTSDKLKNYSAYIGMTKINGKKVDLQSKRCSKEEFYDFIKKNVLKKLEGQPEYEYLKEELERETFLPKQVNRDNGVIPYQIHLYELKKILGNLRDKIDLIKENEDKLVQLFEFRIPYYVGPLNKIDDGKEGKFTWAVRKSNEKIYPWNFENVVDIEASAEKFIRRMTNKCTYLMGEDVLPKDSLLYSKYMVLNELNNVKLDGEKLSVELKQRLYTDVFCKYRKVTVKKIKNYLKCEGIISGNVEITGIDGDFKASLTAYHDFKEILTGTELAKKDKENIITNIVLFGDDKKLLKKRLNRLYPQITPNQLKKICALSYTGWGRFSKKFLEEITAPDPETGEVWNIITALWESNNNLMQLLSNEYRFMEEVETYNMGKQTKTLSYETVENMYVSPSVKRQIWQTLKIVKELEKVMKESPKRVFIEMAREKQESKRTESRKKQLIDLYKACKNEEKDWVKELGDQEEQKLRSDKLYLYYTQKGRCMYSGEVIELKDLWDNTKYDIDHIYPQSKTMDDSLNNRVLVKKKYNATKSDKYPLNENIRHERKGFWKSLLDGGFISKEKYERLIRNTELSPEELAGFIERQIVETRQSTKAVAEILKQVFPESEIVYVKAGTVSRFRKDFELLKVREVNDLHHAKDAYLNIVVGNSYYVKFTKNASWFIKENPGRTYNLKKMFTSGWNIERNGEVAWEVGKKGTIVTVKQIMNKNNILVTRQVHEAKGGLFDQQIMKKGKGQIAIKETDERLASIEKYGGYNKAAGAYFMLVESKDKKGKTIRTIEFIPLYLKNKIESDESIALNFLEKGRGLKEPKILLKKIKIDTLFDVDGFKMWLSGRTGDRLLFKCANQLILDEKIIVTMKKIVKFIQRRQENRELKLSDKDGIDNEVLMEIYNTFVDKLENTVYRIRLSEQAKTLIDKQKEFERLSLEDKSSTLFEILHIFQCQSSAANLKMIGGPGKAGILVMNNNISKCNKISIINQSPTGIFENEIDLLKI

SEQ ID NO: 50 - protein, 984 aa, Campylobacter jejuni
MAKILAFDIGISSIGWAFSENDELKDCGVRIFTKAENPKTGESLALPRRIARSARKRLARRKARLNHLKHLIANEFKLNYEDYQSFDEILAKAYKGSLISPYELRFRALNELLSKQDFARVILHIAKRRGYDDIKNNGDEEKGKILKAIKQNEEKLANYQSVGEYLYKEYFQKFKENSKEFINVRNKKESYERCIAQSFLKDELKLIFKKQREFGFSFSKKFEEEVLSVAFYKRALKDFSHLVGNCSFFTDEKRAPKNSPLAFMFVALTRIINLLNNLKNTLYTKDDLNALLNEVLKNGTLTYKQTKKLLGLSDDYEFKGEKGNYFIEFKKYKEFIKALGEHSLSQDDLNEIAKDITLIKDEIKLKKALAKYDLNENQIDNLSKLEFKDHLNISFKALKLITPLMLEGKKYDEACNELTLKVAINEDKKDFLPAFNETYYKDEVTNPVVLRAIKEYRKVLNALLKKYGKVHKINIELAREVGKNHSQRAKIEKEQNENYKAKKDAELECEKLGLKINSKNILKLRLFKEQKEFCVYSGEKIKLSDLQDEKMLEIDHIYPYSRSFDDSYMNKVLVFTKQNQEKLNQTPFEAFGNDSAKWQKIEVLAKNLPTKKQKRILDKNYKDKEQKDFKDRNLNDTRYIARLVLNYTKDYLDFLPLSDDENTKLNDTQKGSKVHVEAKSGMLTSALRHTWGFSTKDRNNHLHHAIDAVIIAYANNSIVKAFSDFKKEQESNTAELYAKKISELDYKNKRKFFEPFSGFRQKVLDKIDEIFVSKPERKKPSGALHEETFRKEEEFYQSYGGKEGVLKALELGKIRKVNGKIVKNGDMFRVDIFKHKKTNKFYAVPIYTMDFALKVLPNKAVARSKKGEIKDWILMDENYEFCFSLYKDSLILIQTKDMQEPEFVYYNAFTSSTVSLIVSKHDNKFETLSKNQKILFKNANEKEVIAKSIGIQNLKVFEKYIVSALGEVTKAEFRQREEFKNELR

SEQ ID NO: 51 - protein, 1037 aa, Parvibaculum lavamentivorans
MERIFGFDIGTTSIGFSVIDYSSTQSAGNIQRLGVRIFPEARDPDGTPLNQQRRQKRMMRRQLRRRRIRRKALNETLHEAGFLPAYGSADWPVVMADEPYELRRRGLEEGLSAYEFGRAIYHLAQHRHFKGRELEESDTPDPDVDDEKEAANERAATLKALKNEQTTLGAWLARRPPSDRKRGIHAHRNVVAEEFERLWEVQSKFHPALKSEEMRARISDTIFAQRPVFWRKNTLGECRFMPGEPLCPKGSWLSQQRRMLEKLNNLAIAGGNARPLDAEERDAILSKLQQQASMSWPGVRSALKALYKQRGEPGAEKSLKFNLELGGESKLLGNALEAKLADMFGPDWPAHPRKQEIRHAVHERLWAADYGETPDKKRVIILSEKDRKAHREAAANSFVADFGITGEQAAQLQALKLPTGWEPYSIPALNLFLAELEKGERFGALVNGPDWEGWRRTNFPHRNQPTGEILDKLPSPASKEERERISQLRNPTVVRTQNELRKVVNNLIGLYGKPDRIRIEVGRDVGKSKREREEIQSGIRRNEKQRKKATEDLIKNGIANPSRDDVEKWILWKEGQERCPYTGDQIGFNALFREGRYEVEHIWPRSRSFDNSPRNKTLCRKDVNIEKGNRMPFEAFGHDEDRWSAIQIRLQGMVSAKGGTGMSPGKVKRFLAKTMPEDFAARQLNDTRYAAKQILAQLKRLWPDMGPEAPVKVEAVTGQVTAQLRKLWTLNNILADDGEKTRADHRHHAIDALTVACTHPGMTNKLSRYWQLRDDPRAEKPALTPPWDTIRADAEKAVSEIVVSHRVRKKVSGPLHKETTYGDTGTDIKTKSGTYRQFVTRKKIESLSKGELDEIRDPRIKEIVAAHVAGRGGDPKKAFPPYPCVSPGGPEIRKVRLTSKQQLNLMAQTGNGYADLGSNHHIAIYRLPDGKADFEIVSLFDASRRLAQRNPIVQRTRADGASFVMSLAAGEAIMIPEGSKKGIWIVQGVWASGQVVLERDTDADHSTTTRPMPNPILKDDAKKVSIDPIGRVRPSND

SEQ ID NO: 52 - protein, 1107 aa, Eubacterium ventriosum
MGYTVGLDIGVASVGVAVLDENDNIVEAVSNIFDEADTSNNKVRRTLREGRRTKRRQKTRIEDFKQLWETSGYIIPHKLHLNIIELRNKGLTELLSLDELYCVLLSMLKHRGISYLEDADDGEKGNAYKKGLAFNEKQLKEKMPCEIQLERMKKYGKYHGEFIIEINDEKEYQSNVFTTKAYKKELEKIFETQRCNGNKINTKFIKKYMEIYERKREYYIGPGNEKSRTDYGIYTTRTDEEGNFIDEKNIFGKLIGKCSVYPEEYRASSASYTAQEFNLLNDLNNLKINNEKLTEFQKKEIVEIIKDASSVNMRKIIKKVIDEDIEQYSGARIDKKGKEIYHTFEIYRKLKKELKTINVDIDSFTREELDKTMDILTLNTERESIVKAFDEQKFVYEENLIKKLIEFRKNNQRLFSGWHSFSYKAMLQLIPVMYKEPKEQMQLLTEMNVFKSKKEKYVNYKYIPENEVVKEIYNPVVVKSIRTTVKILNALIKKYGYPESVVIEMPRDKNSDDEKEKIDMNQKKNQEEYEKILNKIYDEKGIEITNKDYKKQKKLVLKLKLWNEQEGLCLYSGKKIAIEDLLNHPEFFEIDHIIPKSISLDDSRSNKVLVYKTENSIKENDTPYHYLTRINGKWGFDEYKANVLELRRRGKIDDKKVNNLLCMEDITKIDVVKGFINRNLNDTRYASRVVLNEMQSFFESRKYCNTKVKVIRGSLTYQMRQDLHLKKNREESYSHHAVDAMLIAFSQKGYEAYRKIQKDCYDFETGEILDKEKWNKYIDDDEFDDILYKERMNEIRKKIIEAEEKVKYNYKIDKKCNRGLCNQTIYGTREKDGKIHKISSYNIYDDKECNSLKKMINSGKGSDLLMYNNDPKTYRDMLKILETYSSEKNPFVAYNKETGDYFRKYSKNHNGPKVEKVKYYSGQINSCIDISHKYGHAKNSKKVVLVSLNPYRTDVYYDNDTGKYYLVGVKYNHIKCVGNKYVIDSETYNELLRKEGVLNSDENLEDLNSKNITYKFSLYKNDIIQYEKGGEYYTERFLSRIKEQKNLIETKPINKPNFQRKNKKGEWENTRNQIALAKTKYVGKLVTDVLGNCYIVNMEKFSLVVDK

SEQ ID NO: 53 - protein, 1136 aa, Streptococcus gordonii
MNGLVLGLDIGIASVGVGILEKDTGKIIHASSRLFPAATADNNVERRSNRQGRRLNRRKKHRSVRLQDLFEGYGLLTDFSKVSMNLNPYQLRVQGMENQLTNEELFVALKNIVKRRGISYLDDASEDGGTVSSDYGKAVEENRKLLAEKTPGQIQLERFEKYGQLRGDFTVEENGEKHRLINVFSTSAYRKEAERILRKQQEFNSKITDEFIEDYLIILTGKRKYYHGPGNEKSRTDYGRFRTDGTTLDNIFGILIGKCTFYTEEYRASKASYTAQEFNLLNDLNNLTVPTETKKLSEEQKKLIIEYAKSAKTLGASTLLKYIAKMIDASVDQIRGYRVDVNNKPEMHTFEVYRKMQSLETIKVEELPRKVLDELAHILTLNTEREGIEEAINSKLKDIFNRDQVLELVQFRKNNSSLFSKGWHNFSIKLMMELIPELYETSEEQMTILTRLGKQRSKETSKRTKYIDEKELTEEIYNPVVAKSVRQAIKIINEATKKYGIFDNIVIEMARENNEEDAKKDYIKRQKANQDEKNAAMEKAAFQYNGKKELPDNIFHGHKELTTKIRLWHQQGEKCLYTGKNIPISDLIHNQYKYEIDHILPLSLSFDDSLSNKVLVLATANQEKGQRTPFQALDSMDDAWSYREFKSYVKDSKLLSNKKKDYLLTEEDISKIEVKQKFIERNLVDTRYSSRVVLNALQDFYKSHQLDTTISVVRGQFTSQLRRKWGIEKSRETYHHHAVDALIIAASSQLRLWKKHSNPLIAYKEGQFVDSETGEIVSLSDEEYKELVFKAPYDHFVDTLRSKKFEDSILFSYQVDSKYNRKISDATIYATRKAKLDKEKKEYTYTLGKIKDIYALGTKTPSKTGFYKFLDLYKTDKSQFLMYQKDRKTWDEVIEKIIEQYRPFKEYDKNGKEVDFNPFEKYRIGNGPIRKYSKKGNGPEIKSLKYYDILLGKHKNITPDGSRNTVALLSLNPWRTDVYYNSETKKYEFLGLKYADLCFEEGGAYGISEVKYKKIREKEGIGKNSEFKFTLYKNDLILIKDTETNCQQFFRFWSRTGKDNPKSFEKHKIELKPYEKAKFEKGEELKVLGKVPPSSNQFQKNMQIENLSIYKVKTDILGNKHFIKKEGDEPKLKFKK

SEQ ID NO: 54 - protein, 984 aa, Campylobacter jejuni
MARILAFDIGISSIGWAFSENDELKDCGVRIFTKAENPKTGESLALPRRLARSARKRLARRKARLNHLKHLIANEFKLNYEDYQSFDESLAKAYKGSLISPYELRFRALNELLSKQDFARVILHIAKRRGYDDIKNNGDEEKSEILKAIKQNEEKLVNYQSVGEYLYKEYFQKFKENSKEFINVRNKKESYERCITQSFLKDELKLIFQKQREFGFSFSKKFEEEVLSVAFYKRALKDFSHLVGNCSFFTDEKRAPKNSPLAFMFVALTRIINILNNLKNTEGILYTKDDLNALLNEVLKNGTLTYKQTKKLLGLSDDYEFKGEKGTYFIEFKKYKEFIKALGEHNLSQDDLNEIAKDITLIKDEIKLKKALAKYDLNQNQIDSLSKLEFKDHLNISFKALKLITPLMLEGKKYDEACNELNLKVAINEDKKDFLPAFNETYYKDEVTNPVVLRAIKEYRKILNALLKKYGKVHKINIELAREVGKNHSQRAKIEKEQNENYKAKKDAEIECEKLGLKINSKNILKLRLFKEQKEFCAYSGEKIKLSDLQDEKMLEIDHIYPYSRSFDDSYMNKVLVFTKQNQEKLNKTPFEAFGNDSTKWQKIEVLAKNLPEKKQKRILDKNYKDKEQKDFKDRNLNDTRYIARLVLNYTKDYLDFLPLSDDENTKLNDTQKGSKVHVEAKSGMLTSALRHTWGFSAKDRNNHLHHAIDAAIIAYANNSIVKAFSDFKKEQESNSVELYAKKISELDYKNKRKFFEPFSGFRQKVLDKIDEIFVSKPERKKPSGALHEETFRKEEEFYQSYGGKEGVLKALELGKIRKVNGKIVKNGDMFRVDIFKHKKTNKFYAVPIYTMDFALKVLPNKAVARSKKGEIKDWILMDENYEFCFSLYKDSLILIQTKDMQEPELVYFNAFTSSTVSLIVSKHDNKFETLSKNQKILFKNANEKEVIAKSIGIQNLKVFEKYIVSALGEVTKAEFRQREDFKK

SEQ ID NO: 55 - protein, 1079 aa, Dinoroseobacter shibae
MRLGLDIGTSSIGWWLYETDGAGSDARITGVVDGGVRIFSDGRDPKSGASLAVDRRAARAMRRRRDRYLRRRATLMKVLAETGLMPADPAEAKALEALDPFALRAAGLDEPLPLPHLGRALFHLNQRRGFKSNRKTDRGDNESGKIKDATARLDMEMMANGARTYGEFLHKRRQKATDPRHVPSVRTRLSIANRGGPDGKEEAGYDFYPDRRHLEEEFHKLWAAQGAHHPELTETLRDLLFEKIFFQRPLKEPEVGLCLFSGHHGVPPKDPRLPKAHPLTQRRVLYETVNQLRVTADGREARPLTREERDQVIHALDNKKPTKSLSSMVLKLPALAKVLKLRDGERFTLETGVRDAIACDPLRASPAHPDRFGPRWSILDADAQWEVISRIRRVQSDAEHAALVDWLTEAHGLDRAHAEATAHAPLPDGYGRLGLTATTRILYQLTADVVTYADAVKACGWHHSDGRTGECFDRLPYYGEVLERHVIPGSYHPDDDDITRFGRITNPTVHIGLNQLRRLVNRIIETHGKPHQIVVELARDLKKSEEQKRADIKRIRDTTEAAKKRSEKLEELEIEDNGRNRMLLRLWEDLNPDDAMRRFCPYTGTRISAAMIFDGSCDVDHILPYSRTLDDSFPNRTLCLREANRQKRNQTPWQAWGDTPHWHAIAANLKNLPENKRWRFAPDAMTRFEGENGFLDRALKDTQYLARISRSYLDTLFTKGGHVWVVPGRFTEMLRRHWGLNSLLSDAGRGAVKAKNRTDHRHHAIDAAVIAATDPGLLNRISRAAGQGEAAGQSAELIARDTPPPWEGFRDDLRVRLDRIIVSHRADHGRIDHAARKQGRDSTAGQLHQETAYSIVDDIHVASRTDLLSLKPAQLLDEPGRSGQVRDPQLRKALRVATGGKTGKDFENALRYFASKPGPYQAIRRVRIIKPLQAQARVPVPAQDPIKAYQGGSNHLFEIWRLPDGEIEAQVITSFEAHTLEGEKRPHPAAKRLLRVHKGDMVALERDGRRVVGHVQKMDIANGLFIVPHNEANADTRNNDKSDPFKWIQIGARPAIASGIRRVSVDEIGRLRDGGTRPI

SEQ ID NO: 56 - protein, 1096 aa, Eubacterium dolichum
MMEVFMGRLVLGLDIGITSVGFGIIDLDESEIVDYGVRLFKEGTAAENETRRTKRGGRRLKRRRVTRREDMLHLLKQAGIISTSFHPLNNPYDVRVKGLNERLNGEELATALLHLCKHRGSSVETIEDDEAKAKEAGETKKVLSMNDQLLKSGKYVCEIQKERLRTNGHIRGHENNFKTRAYVDEAFQILSHQDLSNELKSAIITIISRKRMYYDGPGGPLSPTPYGRYTYFGQKEPIDLIEKMRGKCSLFPNEPRAPKLAYSAELFNLLNDLNNLSIEGEKLTSEQKAMILKIVHEKGKITPKQLAKEVGVSLEQIRGFRIDTKGSPLLSELTGYKMIREVLEKSNDEHLEDHVFYDEIAEILTKTKDIEGRKKQISELSSDLNEESVHQLAGLTKFTAYHSLSFKALRLINEEMLKTELNQMQSITLFGLKQNNELSVKGMKNIQADDTAILSPVAKRAQRETFKVVNRLREIYGEFDSIVVEMAREKNSEEQRKAIRERQKFFEMRNKQVADIIGDDRKINAKLREKLVLYQEQDGKTAYSLEPIDLKLLIDDPNAYEVDHIIPISISLDDSITNKVLVTHRENQEKGNLTPISAFVKGRFTKGSLAQYKAYCLKLKEKNIKTNKGYRKKVEQYLLNENDIYKYDIQKEFINRNLVDTSYASRVVLNTLTTYFKQNEIPTKVFTVKGSLTNAFRRKINLKKDRDEDYGHHAIDALIIASMPKMRLLSTIFSRYKIEDIYDESTGEVFSSGDDSMYYDDRYFAFIASLKAIKVRKFSHKIDTKPNRSVADETIYSTRVIDGKEKVVKKYKDIYDPKFTALAEDILNNAYQEKYLMALHDPQTFDQIVKVVNYYFEEMSKSEKYFTKDKKGRIKISGMNPLSLYRDEHGMLKKYSKKGDGPAITQMKYFDGVLGNHIDISAHYQVRDKKVVLQQISPYRTDFYYSKENGYKFVTIRYKDVRWSEKKKKYVIDQQDYAMKKAEKKIDDTYEFQFSMHRDELIGITKAEGEALIYPDETWHNFNFFFHAGETPEILKFTATNNDKSNKIEVKPIHCYCKMRLMPTISKKIVRIDKYATDVVGNLYKVKKNTLKFEFD

SEQ ID NO: 57 - protein, 1082 aa, Neisseria meningitidis
MAAFKPNPINYILGLDIGIASVGWAMVEIDEDENPICLIDLGVRVFERAEVPKTGDSLAMARRLARSVRRLTRRRAHRLLRARRLLKREGVLQAADFDENGLIKSLPNTPWQLRAAALDRKLTPLEWSAVLLHLIKHRGYLSQRKNEGETADKELGALLKGVADNAHALQTGDFRTPAELALNKFEKESGHIRNQRGDYSHTFSRKDLQAELNLLFEKQKEFGNPHISDGLKEGIETLLMTQRPALSGDAVQKMLGHCTFEPAEPKAAKNTYTAERFIWLTKLNNLRILEQGSERPLTDTERTTLIDEPYRKSKLTYAQARKLLELDNTAFFKGLRYGKDNAEASTLMEMKAYHAISRALEKEGLKDKKSPLNLSPELQDEIGTAFSLFKTDEDITGRLKDRVQPEILEALLKHISFDKFVQISLKALRRIVPLMEQGKRYDEACAEIYGDHYGKKNTEEKIDLPPIPADEIRNPVVLRALSQARKVINGVVRRYGSPARIHIETAREVGKSFKDRKEIEKRQEENRKDREKAATKFREYFPNFVGEPKSKDILKLRLYEQQHGKCLYSGKEINLGRLNEKGYVEIDHALPFSRTWDDSFNNKVLVLGSENQNKGNQTPYEYFNGKDNSREWQEFKARVETSRFPRSKKQRILLQKFDEEGFKERNLNDTRYVNRFLCQFVADHMLLTGKGKRRVFASNGQITNLLRGFWGLRKVRAENDRHHALDAVVVACSTVAMQQKITRFVRYKEMNAFDGKTIDKETGEVLHQKTHFPQPWEFFAQEVMIRVFGKPDGKPEFEEADTPEKLRTLLAEKLSSRPEAVHEYVTPLFVSRAPNRKMSGQGHMETVKSAKRLDEGVSVLRVPLTQLKLKDLEKMVNREREPKLYEALKARLEAHKDDPAKAFAEPFYKYDKAGNRTQQVKAVRVEQVQKTGVWVRNHNGIADNATMVRVDVFEKGDKYYLVPIYSWQVAKGILPDRAVVQGKDEEDWQLIDDSFNFKFSLHPNDLVEVITKKARMFGYFASCHRGTGNINIRIHDLDHKIGKNGILEGIGVKTALSFQKYQIDELGKEIRPCRLKKRPPVR

SEQ ID NO: 58 - protein, 1050 aa, Gluconacetobacter diazotrophicus
MGENMIDESLTFGIDLGIGSCGWAVLRRPSAFGRKGVIEGMGSWCFDVPETSKERTPTNQIRRSNRLLRRVIRRRRNRMAAIRRLLHAAGLLPSTDSDALKRPGHDPWELRARGLDKPLKPVEFAVVLGHIAKRRGFKSAAKRKATNISSDDKKMLTALEATRERLGRYRTVGEMFARDPDFASRRRNREGKYDRTTARDDLEHEVHALFAAQRRLGQGFASPELEEAFTASAFHQRPMQDSERLVGFCPFERTEKRAAKLTPSFERFRLLARLLNLRITTPDGERPLTVDEIALVTRDLGKTAKLSIKRVRTLIGLEDNQRFTTIRPEDEDRDIVARTGGAMTGTATLRKALGEALWTDMQERPEQLDAIVQVLSFFEANETITEKLREIGLTLAVLDVLLTALDAGVFAKFKGAAHISTKAARNLLPHLEQGRRYDEACTMAGYDHAASRLSHHGQIVAKTQFNALVTEIGESIANPIARKALIEGLKQIWAMRNHWGLPGSIHVELARDVGNSIEKRREIEKHIEKNTALRARERREVHDLLDLEDVNGDTLLRYRLWKEQGGKCLYTGKAIHIRQIAATDNSVQVDHILPWSRFGDDSFNNKTLCLASANQQKKRSTPYEWLSGQTGDAWNAFVQRIETNKELRGFKKRNYLLKNAKEAEEKFRSRNLNDTRYAARLFAEAVKLLYAFGERQEKGGNRRVFTRPGALTAALRQAWGVESLKKQDGKRINDDRHHALDALTVAAVDEAEIQRLTKSFHEWEQQGLGRPLRRVEPPWESFRADVEATYPEVFVARPERRRARGEGHAATIRQVKERECTPIVFERKAVSSLKEADLERIKDGERNEAIVEAIRSWIATGRPADAPPRSPRGDIITKIRLATTIKAAVPVRGGTAGRGEMVRADVFSKPNRRGKDEWYLVPVYPHQIMNRKAWPKPPMRSIVANKDEDEWTEVGPEHQFRFSLYPRSNIEIIRPSGEVIEGYFVGLHRNTGALTISAHNDPKSIHSGIGTKTLLAISKYQVDRFGRKSPVRKEVRTWHGEACISPTPPG

SEQ ID NO: 59 - protein, 1391 aa, Kordia algicida
MKKILGLDLGTNSIGWALVNEAEHEHEQSSIVKLGVRVNPLSVDEKTNFEKGRPLSINADRTSKRSARRNLQRFKLRRKNLINLLLKHHIISNETILTEVGKNTTHQTLKLRSKATQEKISLEEFARILLSINKKRGYKSSRKEKNEDEGFTIDGMAIAKELYDNQLTPGQYVYNILQDGKNYIPDFYRSDLQAEFDDVWQFQKKFYSSILTDEFYLKLKGQGKENTRKLFLAIHQVYTAENKGKRDAVKLQYYKWRSEAVKKQLSIEEVAYVLVEINNNINKSSGYLGAISDRSKALYFNNETVGEYLYGQLVKNRHNSLRNQVFYRQDYLDEFEKIWETQAKFYDELTNELKQEIRDVVIFYQRKLKSQKHLISDCLFEKHHKAIPKSSPLFQEFKIWQNLNYLEFVHTQSKEKIFFSELDDETRQFVFAELNIRGTLKIKEIKKLIGLETPVYWKSNFDEIEGNRTNQVLYNVYQNIADDLGYGFDWSKKHAFEINAELQAIFKDVGIDTAILNFDASIEENDFDKQKSYQLWHLLYSAEDTDKATEEDKLIYGNINTKLKKQLHQKYGFEAKYGNLLANISLQQDYGNLSAKAIKKILPYLESGNSFYEACTIVGYNPSNSLTKEQQQNRKLKDKLELLPKNSLRNPVVEKILNQKVNLINQLIDEYGKPDEVRIELARELKKSAKQRADLSKHINDATLKNQNIRKTLQKDFGIQNPSKNDVIRYKLYDELKDNGYKTLFTNKYIPKEQLFSKDVDIEHIIPKAILFDDSFSNKTLAYRNVNLAKADATAFDFISSKHLDDLDNYKARVETLFQSKRISKGKYKKLLMTRQNLPEDFIERDLRNSQYIAKKATAMLKEVFRSVVPTSGRITDKLREDWDLVNVMKELNLPKYRTLGLTEFIERKNGNKIEQIIDWTKRNDHRHHAMDALTVAFTTHNHIQYLNNLNVTHGLNGVDTDHEKSRLYAIKQAITKVYIVGKTKKRKFIPPMENFRSHAKNHLEGILISFKNKNKVVTKNKNRTKTKTKGVFNEKIQLTPRGQLHKETIYGHAKKVIVTKEKVSSKFTHEKILQVTKPAYREALLKRLASFKNDPKKAFSGKNALSKNPLYFDITSGKKVPDTVKLSYFENSYVIRKEVNSDNFKNEKSLQKVLDVGIRRILEKRLADYNGNAKEAFSNLEKNPIWKDKEKGVCIKKVRIEALKNAEPLHVKKDHLGKIILDDENKSTPVDFISTGNNHHVAIYEDKDGKLHDKVVSFYEVVSRVNLGLPIIDKSFNSHLDWKFLFSMKQNEMFVFPSEDFNPKEIDIGNPKNNELISKYLFRVQKFSKVTYGNSAVRDYVFRHHLETELIDKKELKGITYYQLKSIGMLEKLVKVRINHIGKIVHIGEY

SEQ ID NO: 60 - protein, 1116 aa, Clostridium spiroforme
MVEFLLKEMKIMGRLVLGLDIGITSVGYGVIDIDKNEFVDYGVRLFKEGTAINNEERRSKRGARRLKRRKTNRIADMKKLLERNGLIDEQYTALNNPYEIRKKGLKNKLSNYELATAILHITKNRGTCLESNADETQDEESTKNILSKNALELKDKYICEIQLARLEESGKIRGINNNFKTEDYLKELSKILENQDLEKETIDKIKEIVARRRRYDQGPGSEKSPTPYGSYRMENGELVHVNLIDMMRGKCSVFPDQLRAPQQSYSAELFNLLNDLNNLKINGEKLSSTEKQKIIDFVNEKGGITVKQLLKLIDVGITEISGFRIDKNEKPLITEFKGYKKVLKVFKNYNQESLLNDKSIVDTIMDINTKIKSIDERSDQLKQVLPSLDTSIINDLASIKGVSGYHSLSLKALNLINNEMLKTEMNQMQVLHQLDIFDKNRVSLKGQRQIYADDNAILSPVAKRAHRETFKVINKLRSIYGEFDSIVIETTRDKNTQDQKKRIKNNQKNYEERNTEVNNFLKEAGYNPENINAKTKMKIRLYIEQDAKSAYTLQDINLKELIEDEKAYEIDHIIPISISLDDSFNNKVLTTHDENQEKGNLTPISAFLKGKFHNGNLNTYKVFIQNNKNLNRKKKEYLLCEDDITRYEVVQNFINRNLVDTSYACRTVMNTLVHYFKDNEINTKVHTIKGQATSTFRKRIGLIKDREEDYFHHAIDALIVASLKKMNLINSYLMKVDFNEMYDEETGEIFNVLPDNSYLDEKYISFVSNLKNIYEESNKYIRGVMIKEKMTYPLIKVSHKIDTKPNRKISDDTIYSTRNVDNQDMLVERIKNIYDPKENAANTLINDIINDNTDKYIMYHKDPQTFDKIKAIVLNHFNEFKTDKNCYIVTKEGLYKLKGTSPLALYYEEFGPITKYAKKNNGPTIHSMKFYSEKLGNHLSITHKYSTVNKKVITKQISPYRTDFYQSPEGKYKFVTVRYKDVAYNAKKDKYIIDHSWYREQKKLKKIADEWIFVCSVHRDELIGIMKADGQKRIFDSSTESDGETLYHDAKTYEILKFTATNNDITGRFEVKPIYCYCKKQLMVSIGTCRKIQKFATDVLGNLYIVKDNVLKLEFK

SEQ ID NO: 61 - protein, 1348 aa, Finegoldia magna
MKSEKKYYIGLDVGTNSVGWAVTDEFYNILRAKGKDLWGVRLFEKADTAANTRIFRSGRRRNDRKGMRLQILREIFEDEIKKVDKDFYDRLDESKFWAEDKKVSGKYSLFNDKNFSDKQYFEKFPTIFHLRKYLMEEHGKVDIRYYFLAINQMMKRRGHFLIDGQISHVTDDKPLKEQLILLINDLLKIELEEELMDSIFEILADVNEKRTDKKNNLKELIKGQDFNKQEGNILNSIFESIVTGKAKIKNIISDEDILEKIKEDNKEDFVLTGDSYEENLQYFEEVLQENITLFNTLKSTYDFLILQSILKGKSTLSDAQVERYDEHKKDLEILKKVIKKYDEDGKLFKQVFKEDNGNGYVSYIGYYLNKNKKITAKKKISNIEFTKYVKGILEKQCDCEDEDVKYLLGKIEQENFLLKQISSINSVIPHQIHLFELDKILENLAKNYPSFNNKKEEFTKIEKIRKTFTFRIPYYVGPLNDYHKNNGGNAWIFRNKGEKIRPWNFEKIVDLHKSEEEFIKRMLNQCTYLPEETVLPKSSILYSEYMVLNELNNLRINGKPLDTDVKLKLIEELFKKKTKVTLKSIRDYMVRNNFADKEDFDNSEKNLEIASNMKSYIDFNNILEDKFDVEMVEDLIEKITIHTGNKKLLKKYIEETYPDLSSSQIQKIINLKYKDWGRLSRKLLDGIKGTKKETEKTDTVINFLRNSSDNLMQIIGSQNYSFNEYIDKLRKKYIPQEISYEVVENLYVSPSVKKMIWQVIRVTEEITKVMGYDPDKIFIEMAKSEEEKKTTISRKNKLLDLYKAIKKDERDSQYEKLLTGLNKLDDSDLRSRKLYLYYTQMGRDMYTGEKIDLDKLFDSTHYDKDHIIPQSMKKDDSIINNLVLVNKNANQTTKGNIYPVPSSIRNNPKIYNYWKYLMEKEFISKEKYNRLIRNTPLTNEELGGFINRQLVETRQSTKAIKELFEKFYQKSKIIPVKASLASDLRKDMNTLKSREVNDLHHAHDAFLNIVAGDVWNREFTSNPINYVKENREGDKVKYSLSKDFTRPRKSKGKVIWTPEKGRKLIVDTLNKPSVLISNESHVKKGELFNATIAGKKDYKKGKIYLPLKKDDRLQDVSKYGGYKAINGAFFFLVEHTKSKKRIRSIELFPLHLLSKFYEDKNTVLDYAINVLQLQDPKIIIDKINYRTEIIIDNFSYLISTKSNDGSITVKPNEQMYWRVDEISNLKKIENKYKKDAILTEEDRKIMESYIDKIYQQFKAGKYKNRRTTDTIIEKYEIIDLDTLDNKQLYQLLVAFISLSYKTSNNAVDFTVIGLGTECGKPRITNLPDNTYLVYKSITGIYEKRIRIK

SEQ ID NO: 62 - protein, 1129 aa, Streptococcus infantarius
MSNGKILGLDIGVASVGVGIIDSKTGNVIHANSRLFSAANAENNAERRGFRGARRLTRRKKHRVKRVRDLFEKYDISTDFRNLNLNPYELRVKGLTEQLTNEELFAALRTIAKRRGISYLDDAEDDSTGSSDYAKSIDENRRLLKTKTPGQIQLERLEKYGQLRGNFTVYDENGEAHRLINVFSTSDYKNEARKILETQSNYNKQITDEFIEDYIEILTQKRKYYHGPGNEKSRTDYGRFRTDGTTLENIFGILIGKCSFYPEEYRASKASYTAQEFNFLNDLNNLKVPTETGKLSTEQKEYLVDFAKKSKALGASKLLKEIAKIVDCSVDDIKGYRVDNKDKPDLHTFEPYRKLKFNLSSIDIDELSRETLDKLADILTLNTEREGIEDAIKRNLPSQFTEEQISEIVQIRKNQSSAFNKGWHSFSAKLMNELIPELYVTSEEQMTILTRLEKFKVNKKSSKNTKTIDEKEITDEIYNPVVAKSVRQTIKIINAAVKKYGDFDKIVIEMPRDKNAEDEKKFIDKKQKENKKEKDDSLKRAAFLYNGTDNLPDGVFHGNKELKTKIRLWYQQGERCLYSGKLISIHDLVHNSNKFEIDHILPLSLSFDDSLANKVLVYAWTNQEKGQKTPYQVIDSMDTAWSFREMKDYVLKQKGLGKKKCEYLLTTENIDKIEVKKKFIERNLVDTRYASRVVLNSLQTALKELGKDTKVSVVRGQFTSQLRRKWNIDKSRETYHHHAVDALIIAASSQLKLWQKQENPMFESYGENQVVNKETGEILSISDDKYKELVFQPPYQGFVNTISSKGFEDEILFSYQVDSKFNRKVSDATIYSTRKAKLGKDKKDETYVLGKIKDIYSQDGFDTFIKRYKKDKTQFLMYQKDPLTWENVIEVILRDYPSEKLSEDGKKTVKCNPFEEYRRENGLICKYSKKGNGTPIKSLKYYDKKLGNCIDITPEKSKNRVVLRQISPWRADIYFNLETLKYELMGLKYSDLSFEKGTGKYHISQEKYDAIREKEGIGKKSEFKFTLYRNDLILIKDTLNNCERMLRFGSKNDTSKHYVELKPLEKGTFDSEEEILPVLGKVAKSGQFIKGLNKPNISIYKVRTDVLGNKFFIKKEGDKPKLDFKNNNK

SEQ ID NO: 63 - protein, 1065 aa, Clostridium perfringens
MNKDINYALGLDIGITSVGWAVINLDLNRIEDLGVRIFNAAENLKDGSSLALPRRLARGRRRLLRRKAYRVERVRKLILKNNILTKEELEGLFKNKEVIDVWEARVKGLDYKLSREEWAKILINFCKRRGFKSNRKNEAKDKEAGQILSSISYNIEKMKETNSRTIGEYIYNEVKNSEDSYAPLRNKFGEYKMCVSRDVIREEIHTLFEKQRELGNNFASDEIEDKYFEIFNSQRPFSNFEDLEKLVGFCTFERKKHKRAPKHCISSEEFTLYEGINKLSIIKDGEKRKLSEEERTLVVNEAFNKKEIKYTTLRKLLGLSEEELFSTLTYSIDKDISKTENTKFVSLKGYHEIKRAIEKGVSKKAWQDIENNRNLLNDIAYVLTLGKTDDEIEKQLRLRNVPEELFESLLDMSFNKFNNLSIYALEKILPFMKEGYQYNEACEKAGYNFKAIYEGVRTKKLPVIEIDEIVNPVVNRALAQTRKVINSVIDKYGSPVRINIELARDLAKNFKDRKLIEKEQKENRANLDKIRENLRELMDKEPTVVEVLKYRLWEQQRGECAYTQSQIPLERLFSPGYCEIDHIIPFSRSFDDSLSNKILVLGSENQRKGNRTPYEYFGEDSERWNSFEIWVKGSYLNYKKKANLLKKKFSEEEQRDWKARNLQDTKYICRYISNFVNNRLEFKESENKQKVITVNGRATAYLRSRWGLNKVREDGDKHHALDAAVVGVTTQGMVQKISKYSKAHELYTVRKNDEFVDVETGECVDVDEYKEIRKDILPRPWRGFSEELKLRLSDNPLEELKKSPIETYNEEFIKENVKPIFVSRVPFRKISGKLFKETIYSERAFKDGYFVSKKSLVDLKRGDLDNFYNYECDKKLYDAISERMKEFNYNGKKAFESPFRKPTKSGKEGPVVRSVKIKSAVPFKDGIPMNEGLVAKEGMVRIDIYEKEGKYFVVPVYRYQLAKGIVPKRAAIAKKDELKWPIMDQTYNFKFSIYKNDLIEVKYDKKGVYFGYYDGFDRNSASLTIEKHDNSERYRSIGLKVGVLEINKYEVDVLGNYHKVKLGGN

SEQ ID NO: 64 - protein, 1195 aa, Elusimicrobium minutum
MQKNINTKQNHIYIKQAQKIKEKLGDKPYRIGLDLGVGSIGFAIVSMEENDGNVLLPKEIIMVGSRIFKASAGAADRKLSRGQRNNHRHTRERMRYLWKVLAEQKLALPVPADLDRKENSSEGETSAKRFLGDVLQKDIYELRVKSLDERLSLQELGYVLYHIAGHRGSSAIRTFENDSEEAQKENTENKKIAGNIKRLMAKKNYRTYGEYLYKEFFENKEKHKREKISNAANNHKFSPTRDLVIKEAEAILKKQAGKDGFHKELTEEYIEKLTKAIGYESEKLIPESGFCPYLKDEKRLPASHKLNEERRLWETLNNARYSDPIVDIVTGEITGYYEKQFTKEQKQKLFDYLLTGSELTPAQTKKLLGLKNTNFEDIILQGRDKKAQKIKGYKLIKLESMPFWARLSEAQQDSFLYDWNSCPDEKLLTEKLSNEYHLTEEEIDNAFNEIVLSSSYAPLGKSAMLIILEKIKNDLSYTEAVEEALKEGKLTKEKQAIKDRLPYYGAVLQESTQKIIAKGFSPQFKDKGYKTPHTNKYELEYGRIANPVVHQTLNELRKLVNEIIDILGKKPCEIGLETARELKKSAEDRSKLSREQNDNESNRNRIYEIYIRPQQQVIITRRENPRNYILKFELLEEQKSQCPFCGGQISPNDIINNQADIEHLFPIAESEDNGRNNLVISHSACNADKAKRSPWAAFASAAKDSKYDYNRILSNVKENIPHKAWRFNQGAFEKFIENKPMAARFKTDNSYISKVAHKYLACLFEKPNIICVKGSLTAQLRMAWGLQGLMIPFAKQLITEKESESFNKDVNSNKKIRLDNRHHALDAIVIAYASRGYGNLLNKMAGKDYKINYSERNWLSKILLPPNNIVWENIDADLESFESSVKTALKNAFISVKHDHSDNGELVKGTMYKIFYSERGYTLTTYKKLSALKLTDPQKKKTPKDFLETALLKFKGRESEMKNEKIKSAIENNKRLFDVIQDNLEKAKKLLEEENEKSKAEGKKEKNINDASIYQKAISLSGDKYVQLSKKEPGKFFAISKPTPTTTGYGYDTGDSLCVDLYYDNKGKLCGEIIRKIDAQQKNPLKYKEQGFTLFERIYGGDILEVDFDIHSDKNSFRNNTGSAPENRVFIKVGTFTEITNNNIQIWFGNIIKSTGGQDDSFTINSMQQYNPRKLILSSCGFIKYRSPILKNKEG

SEQ ID NO: 65 - protein, 1101 aa, Akkermansia muciniphila
MSRSLTFSFDIGYASIGWAVIASASHDDADPSVCGCGTVLFPKDDCQAFKRREYRRLRRNIRSRRVRIERIGRLLVQAQIITPEMKETSGHPAPFYLASEALKGHRTLAPIELWHVLRWYAHNRGYDNNASWSNSLSEDGGNGEDTERVKHAQDLMDKHGTATMAETICRELKLEEGKADAPMEVSTPAYKNLNTAFPRLIVEKEVRRILELSAPLIPGLTAEIIELIAQHHPLTTEQRGVLLQHGIKLARRYRGSLLFGQLIPRFDNRIISRCPVTWAQVYEAELKKGNSEQSARERAEKLSKVPTANCPEFYEYRMARILCNIRADGEPLSAEIRRELMNQARQEGKLTKASLEKAISSRLGKETETNVSNYFTLHPDSEEALYLNPAVEVLQRSGIGQILSPSVYRIAANRLRRGKSVTPNYLLNLLKSRGESGEALEKKIEKESKKKEADYADTPLKPKYATGRAPYARTVLKKVVEEILDGEDPTRPARGEAHPDGELKAHDGCLYCLLDTDSSVNQHQKERRLDTMTNNHLVRHRMLILDRLLKDLIQDFADGQKDRISRVCVEVGKELTTFSAMDSKKIQRELTLRQKSHTDAVNRLKRKLPGKALSANLIRKCRIAMDMNWTCPFTGATYGDHELENLELEHIVPHSFRQSNALSSLVLTWPGVNRMKGQRTGYDFVEQEQENPVPDKPNLHICSLNNYRELVEKLDDKKGHEDDRRRKKKRKALLMVRGLSHKHQSQNHEAMKEIGMTEGMMTQSSHLMKLACKSIKTSLPDAHIDMIPGAVTAEVRKAWDVFGVFKELCPEAADPDSGKILKENLRSLTHLHHALDACVLGLIPYIIPAHHNGLLRRVLAMRRIPEKLIPQVRPVANQRHYVLNDDGRMMLRDLSASLKENIREQLMEQRVIQHVPADMGGALLKETMQRVLSVDGSGEDAMVSLSKKKDGKKEKNQVKASKLVGVFPEGPSKLKALKAAIEIDGNYGVALDPKPVVIRHIKVFKRIMALKEQNGGKPVRILKKGMLIHLTSSKDPKHAGVWRIESIQDSKGGVKLDLQRAHCAVPKNKTHECNWREVDLISLLKKYQMKRYPTSYTGTPR

SEQ ID NO: 66 - protein, 1187 aa, Bifidobacterium longum
MLSRQLLGASHLARPVSYSYNVQDNDVHCSYGERCFMRGKRYRIGIDVGLNSVGLAAVEVSDENSPVRLLNAQSVIHDGGVDPQKNKEAITRKNMSGVARRTRRMRRRKRERLHKLDMLLGKFGYPVIEPESLDKPFEEWHVRAELATRYIEDDELRRESISIALRHMARHRGWRNPYRQVDSLISDNPYSKQYGELKEKAKAYNDDATAAEEESTPAQLVVAMLDAGYAEAPRLRWRTGSKKPDAEGYLPVRLMQEDNANELKQIFRVQRVPADEWKPLFRSVFYAVSPKGSAEQRVGQDPLAPEQARALKASLAFQEYRIANVITNLRIKDASAELRKLTVDEKQSIYDQLVSPSSEDITWSDLCDFLGFKRSQLKGVGSLTEDGEERISSRPPRLTSVQRIYESDNKIRKPLVAWWKSASDNEHEAMIRLLSNTVDIDKVREDVAYASAIEFIDGLDDDALTKLDSVDLPSGRAAYSVETLQKLTRQMLTTDDDLHEARKTLFNVTDSWRPPADPIGEPLGNPSVDRVLKNVNRYLMNCQQRWGNPVSVNIEHVRSSFSSVAFARKDKREYEKNNEKRSIFRSSLSEQLRADEQMEKVRESDLRRLEAIQRQNGQCLYCGRTITFRTCEMDHIVPRKGVGSTNTRTNFAAVCAECNRMKSNTPFAIWARSEDAQTRGVSLAEAKKRVTMFTFNPKSYAPREVKAFKQAVIARLQQTEDDAAIDNRSIESVAWMADELHRRIDWYFNAKQYVNSASIDDAEAETMKTTVSVFQGRVTASARRAAGIEGKIHFIGQQSKTRLDRRHHAVDASVIAMMNTAAAQTLMERESLRESQRLIGLMPGERSWKEYPYEGTSRYESFHLWLDNMDVLLELLNDALDNDRIAVMQSQRYVLGNSIAHDATIHPLEKVPLGSAMSADLIRRASTPALWCALTRLPDYDEKEGLPEDSHREIRVHDTRYSADDEMGFFASQAAQIAVQEGSADIGSAIHHARVYRCWKTNAKGVRKYFYGMIRVFQTDLLRACHDDLFTVPLPPQSISMRYGEPRVVQALQSGNAQYLGSLVVGDEIEMDFSSLDVDGQIGEYLQFFSQFSGGNLAWKHWVVDGFFNQTQLRIRPRYLAAEGLAKAFSDDVVPDGVQKIVTKQGWLPPVNTASKTAVRIVRRNAFGEPRLSSAHHMPCSWQWRHE

SEQ ID NO: 67 - protein, 166 aa, uncultured Termite
MNKVQEIEYKKIREKLADREYRIGLDLGVGSIGYVVVSLKECNDLSYLPEDIILSGSRIFKSSIGAVERREFRLQRNSHRHHRERMRFLWQLLAEKQLALQSSKDLEKKENSADCETSQKRFPINILKEDPYILRYKALEEKLSLFQLGYVLYHIANHSNTAYENT

SEQ ID NO: 68 - protein, 1032 aa, uncultured Termite
MLYHIANHRGTDSVRSFLEYDDDKIKENTLTAKIAKETKKVIDAKKYRTFGEYLYKGKIEKFQQNIRKKVSNRKTPANKNKEFAVTRDVIIKETEKILASQKQYYTYILTDEYIKKIKDAISYQTEKLIPESGYCPYFKDEKRLPRSHKLNEYRRMYEALNNAKYFDPVLDENTGEILSYQEKEFSREEKKILFDEVLLKGMELTESGAKKLLYHLPDGCEVQLQGRDKTTQKIKGYALVDLEASPFWLRLSQQQQDEFLYDWNSLPLEKLKPKLTNYYSLTESEVDETFQEIKLPSNYASVGKKAMEILLTYIKDGCSYTEALEKAVSEGKLKVDKQTMIYDSLPYYGKILKESTQKLIGKAFSKQFADRNYKEPDTNKNEREFGKIANPVVHQTLNELRKLINEIITVFGKKPLEIGLETTRELKKSKKNREYLSKQQNKNEYARNRIYKEYIEPHLSQIKSRQENPSKYISKFELLEEQNFICPFCSEKITPDDIINSKVDVEHIFPIEESEDITKNNLVIAHNECNADKGKKSPFDAFGDKTSGKYRWNCILHNAQKNLPHKVWRFYQGSLEKFLENKPMSRRFGTDNSYISKIAARYLACLFNDPYHSEIFCIKSSLIAQLRIAWDLNSIMVPLVKNILSEKELEEFKISKNKKIRIDNRHHALDAIVIAYANRGYHNFLNRIHAKEYKINYREKSWLSKILLPPLNRDLEDFKISVKDSIEKANVSIKHDHNTNGSLVKATAYKVYYSGAGEYIITTSKNVEEISFKEKEDPKDTLYRALCKFECRDIDIKDEKLIKKLKYNSTLYKKVQNNLSKAKQELEQDNKKTEEEGKKSQKITEVRIYKKACSLVKGQYIQCGSRLKDKFFAVKEPTEIKTGLGYDTGDNLFLDLYYDKTGKLCGEIIRKVNFNRNKPNYQKEGYTLFERIYQSDILEVDTSEDRISLKNKTGSAPSDRTFIKVNTFTEVNAYFDGKRDKIQIFFGNLLKSSFKNDSFFISSMQKYNVRKVILTSLGIIKYRSQILKNKEV

SEQ ID NO: 69 - protein, 1032 aa, uncultured Termite
MKKRILGLDIGIASVGWALVEFDDEFQDNKKKGTIIKSGVRIFTRAETPKERESLAKPRREARSQRRRIRRRVERLNSIRELFVKNGVVEEWSVSKKNPNNIYITLNQIKTPWQLRMESLDRKLTNEQFAVVLTHLAKHRGYKSLRKDDKAGKVLEAISQNKKRLNDSDYRTLGEMFCKNESYKEHKRNKGGEYINSVARELIEEEVEKIFVKQREKGNNFADVNTEREYLKIAFSQKPAGSISKMVGFCTFENGEKRAPRDSYSAELFKVLCTINNTTFTDMKTGEIRSFSKEEIGKTLETVKNVKDVKYAKIRKDLGLEDSVKFSGVDYRENAKSKGEGEIFVSMKTYHEIKSKIEKLSKEKWDNLKGNTELLDSIVNIIANLKDDESIKKEFQKLKIDEDIIDVLLNFEFKKFINLSFKALRKIIPFQFQGQKYITASTSAGYSLKQEGIKNKLVPPAKENINVAVVARAFAQTRKVINAVIRKYGQFDQINIELATELKNSKFDRSKIEEGQKKFQSQKDKIFKEVQELRGGMTPSSSLLLKYRLWREQDERCVYSGRKISFEDLLDTGFLDIDHIIPYSKSMDDSFNNKVLCLAEENRNKKNDIPFNYYQRIDRDWNLLISIITSMKNMKIAKKSRLLKQELSDIEGFIERNINDTRYATRYIKDFLENNLEFKENEFIKVKVQARSGGLTSVLSYNWGMSKDREESYFHHAKDAIIVACSTQGMVQYISKISQQYENDKDKMKKIKDKTENCIPKPWDSFRADVEESIEGIFVSFAPRHKVTGSAHKETIYSKKHLEKERYVTVKKSLDKIKLSDLENIPCNENCGIIRVLKERLEKFKNDSLKAFADPVHMPTKCPNKKGPVIRSVKIKESNKTGIEVRKGLAERGEMVRVDVFIKDKKYYLVPIYVSDFKNKDLPNKAIAALKLENEWIMIDKTYSFKFSLFKDDLIKIKKKKEEIFGYFGGVHRSTGTIKIKSRHKPKEIDEGIGSRCLLDFRKFQVDVLGNYTEVKHEKRMPAYITRKDKKH

SEQ ID NO: 70 - protein, 1361 aa, Lactobacillus casei
MTKLGKPYGIGVDIGSNSIGFAAVDENSHLIRLKGKTVIGARLFEEGKAAADRRASRTTRRRLSRNRWRLSFLRDFFESHITPTGPNFFMRQKYSEISPKDKARYKYEKRLFNDRTDAEFYQQYPTMYHLRNRLLTDPSKADVREIYFAIHHILKSRGHFLTSGYAKDFNTNKVALNEIFPALQDAYAQVYPDLDITFDENKVNEFKTVLLNEKATPSDTQRALVNLLLAEDGDKDILKQQKQVLTEFAKAVVGLKTKLNVALGTEVDSSEATVWNFSLGQLDDKWAGIESAMTDEGTEILDQIRDLYRARLLNGIVPAGKTLSQAKVDDYAQHHEDLELFKDYLKQLEDDGTAKAIRQLYDRYIDGDDAKPFVREDFVKALTKEVTAHPNAKSPELLERLAQPDFMLKQRNKANGAIPVQMQQRELDQIIKNQSVYYDWLAAPNPVEKHRKSMPYQLDELLNFRIPYYVGPLVTAKEQKAAQGGVFAWMVRKDPDGNITPYNFDEKVDREASANTFIQRMKTTDTYLIGEDVLPKQSLLYQRYEVLNELNNVRVNNEKLSIEQKQQVIRELFERHNSVTIKQFAENLRAHGDYAHIPEIRGLADEKRFLSSLSTYRQLKSLLPDAIDDPAKQADIENIIAWSTVFEDAAIFKTKLKEINWLDSQTITKLSNIRYRGWGQFSHKFLNGLTLGNGHTIIQELFLSNNNLMQILTDETLQKKMTELNADKLKAANINDAIDDAYTSPSNKKALRQVLRVIEDIKRAADGQDPSWLYVETADGGGTPGKRTRARQHQLQEIYANAAHELIDSAVRGELEDKIADKADFNDRLVLYFMQGGRDIYTGTPLNIDQLSSYDIDHILPQSLIKDNSLDNRVLVHAIINREKNATFASTIYAQKMNATWRQWHEAGLISGRKLRNLQMRPDQIDKYASGFVARQLVETRQIIKLTEQIVAAQYPETKIIAVKAGLSHQLREELEFPKNRDVNHYHHAFDAFLAARIGTYLLKRFPNLQAFFTYGKFKKADVKKLRGFNFIRDITHAEDKIVVKDTGEVIWDKKRDVDELDRIYNFKRMLITHEVHFEKADLFKQTVYGAKDSKEAGGKKQLISKKKGYPVDIYGGYTQETGSYLSVVRLTKKAMYAVVKVSTRDAAKLAVAKSISEQKENETLNDIIDEKLSKISKNGKITHELFEVVLPRVGQKTLFKNSKYNLFLVNSDTYMHNYQELWMPREYQKMWKDISLSKYGDAQTEDQLDQIFGFIVSQVNSYFNLYDINQFRKKLNDAADKFATLPMRDTDDMQGKIATIGQLLIGLQANAARSDLRNLDIKTPLGLLQIPNGISLDSDTSVVYQSPTGLLEREVHLSDL

SEQ ID NO: 71 - protein, 1348 aa, Streptococcus equi
MKKPYTIALDIGTNSVGWVVVTDDYRVPTKKMKVLGNTERKTIKKNLIGALLFDSGDTAEGTRLKRTARRRYTRRKNRLRYLKEIFTEEMAKVDDGFFQRLEDSFYVLEDKEGNKHPIFANLADEVAYHKKYPTIYHLRKELVDNPQKADLRLIYLAVAHIIKFRGHFLIEGTLSSKNNNLQKSFDHLVDTYNLLFEEQRLLTEGINAKELLSAALSKSKRLENLISLIPGQKKTGIFGNIIALSLGLTPNFKANFGLSKDVKLQLAKDTYADDLDSLLAQIGDQYADLFLAAKNLSDAILLSDILTESDEITRAPLSASMVKRYREHHKDLVTLKTLIKDQLPEKYQEIFLDKTKNGYAGYIEGQVSQEEFYKYLKPILARLDGSEPLLLKIDREDFLRKQRTFDNGSIPHQIHLEELHAILRRQEVFYPFLKDNRKKIESLLTFRIPYYVGPLARGHSRFAWVKRKFDGAIRPWNFEEIVDEEASAQIFIEKMTKNDLYLPNEKVLPKHSLLYETFTVYNELTKVKYATEGMTRPQFLSADQKQAIVDLLFKTNRKVTVKQLKENYFKKIECWDSVEITGVEDSFNASLGTYHDLLKIIQDKDFLDNPDNQKIIEDIILTLTLFEDKKMISKRLDQYAHLFDKVVLNKLERHHYTGWGRLSGKLINGIRDKQSGKTILDFLKADGFANRNFMQLIHDSELSFIDEIAKAQVIGKTEYSKDLVGNLAGSPAIKKGISQTIKIVDELVKIMGYLPQQIVIEMARENQTTAQGIKNARQRMRKLEETAKKLGSNILKEHPVDNSQLQNDKRYLYYLQNGKDMYTGDDLDIDYLSSYDIDHIIPQSFIKNNSIDNKVLTSQGANRGKLDNVPSEAIVRKMKGYWQSLLRAGAISKQKFDNLTKAERGGLTQVDKAGFIQRQLVETRQITKHVAQILDSRFNTEFDDHNKRIRKVHIITLKSKLVSDFRKEFGLYKIRDINHYHHAHDAYLNAVVAKAILGKYPQLAPEFVYGDYPKYNSFKERQKATQKMLFYSNILKFFKDQESLHVNSDGEEIWNANKHLPIIKNVLSIPQVNIVKKTEVQTGGFYKESILSKGNSDKLIPRKNNWDTRKYGGFDSPTVAYSVLVIAKMEKGKAKVLKPVKEMVGITIMERTAFEENPVVFLEARGYREIQEHLIIKLPKYSLFELENGRRRLLASASELQKGNELFLPVDYMTFLYLAAHYHELTGSSEDVLRKKYFVDRHLHYFDDIIQMINDFAERHILASSNLEKINHTYHNNSDLPVNERAENIINVFTFVALGAPAAFKFFDATIDRKRYTSTKEVLNATLIHQSVTGLYETRIDLSQLGEN

SEQ ID NO: 72 - protein, 1341 aa, Ruminococcus lactaris
MGKGYYVGLDMGTGSVGWAVTDESYQILRRHGKAMWGVRLFESAKTAEERRMFRTGRRRLDRRGWRIEILQEIFAEEISRVDPGFFLRMKESKYYPEDKRDIQGNCPELPYTLFVDKTFTDKDFHKKYPTIYHLRKMLMETEDTPDMRLVYLALHHMMKHRGHFLLSGDISQVTEFKNTFNQFIENIRNEEMDFEIELDESAVQMIEETLKDKNLTRSAKKSKLVKGLNAKNVRDKAFLTLLSGGTVKLSDLFGMEELNEGERPKISFADNGYEEYAAVVEMELGELYYIVESAKAVYDWAILSDILGGSTSVSDAKVRAYEKHKADLKYLKAVVKEYFPKEVYNAVFVESSDKLNNYPAYIGMTKKNGKKVSLEGKRCSREEFMDFLKKNIVVKLPDEEAKMYLQSELEKDSFLPKQVNKDNGVIPYQVHKYELKKILDNLGDKIPFLKENAEKIEKLFSFRIPYYVGPLRTGNGENSKFAWAERKSTEKIYPWNFENVIDVEQSAENFIRRMTNKCTYLIGEDVLPKDSLLYSKFMVLNELNNLRLDGQKISVELKQKIYRDVFCRSRKVTQKKLKSYLIREGIAGKNVELTGIDGDFKGSLTAYHDFKEKLIDVELTQKEKEEIILNIVLFGDDKKLLKQRLKKKFPQLTEKQINTVTALSYKGWGRLSKKLLEEVTVPAPETGEVWNIITALWETNDNFMQLLSKEYQFSDRIEEFNEEKADPEVSYQTIEDLYVSPAVKRQIWQTLQIIQEIEKVMGEKPKRVFVEMAREKQENKRTESRKKTLSDLYTKCKKEEPEWIEALCTSLEKHEEHQLRSDKLYLYYTQKGRCMYSGEPIDLEDLWDNTKYDIDHIYPQSKTMDDSLKNRVLVKKEYNAKKSDTYPIAADIQKKMMPFWKSLLTGGFIPKEKYDRLVRNNPLDANELAGFIERQIVETRQSTKAVAEILKKILPDTEIVYVKAKTVSKFRQDFDFIKVRDMNDLHHAKDAYLNIVVGNVYFVKFTKNAAWFVKENPGRTYNLEKMFIWDVARDGEIAWKAGKSGSIVQVRAMMEKNHILVTRRSYEVKGGLFDQQILKKGKGQVPVKESDERLRDIGKYGGYNKAAGVYFMLVSSKDKKGKEQRTIEFVPIYLKDRVEKDMESARNYLMEERGLREPKILIKKIKIDTLFKVDGFYMWLSGRTSNQLIFKGANQLILSKEDMKTLKKVVKYIQRQKEDKNVKISMRDGITEEELLKLYETFLDKIRHSIYGARLSSQEKTLVNGKEKFIDLSVEAKCQVLYEILHLFQCQSGAANLKMIGGPASAGILVMNNNISKCKNISIVNQSPTGIYEKEIDLLRV

SEQ ID NO: 73 - protein, 1003 aa, Gluconacetobacter diazotrophicus
MIDESLTFGIDLGIGSCGWAVLRRPSAFGRKGVIEGMGSWCFDVPETSKERTPTNQIRRSNRLLRRVIRRRRNRMAAIRRLLHAAGLLPSTDSDALKRPGHDPWELRARGLDKPLKPVEFAVVLGHIAKRRGFKSAAKRKATNISSDDKKMLTALEATRERLGRYRTVGEMFARDPDFASRRRNREGKYDRTTARDDLEHEVHALFAAQRRLGQGFASPELEEAFTASAFHQRPMQDSERLVGFCPFERTEKRAAKLTPSFERFRLLARLLNLRITTPDGERPLTVDEIALVTRDLGKTAKLSIKRVRTLIGLEDNQRFTTIRPEDEDRDIVARTGGAMTGTATLRKALGEALWTDMQERPEQLDAIVQVLSFFEANETITEKLREIGLTLAVLDVLLTALDAGVFAKFKGAAHISTKAARNLLPHLEQGRRYDEACTMAGYDHAASRLSHHGQIVAKTQFNALVTEIGESIANPIARKALIEGLKQIWAMRNHWGLPGSIHVELARDVGNSIEKRREIEKHIEKNTALRARERREVHDLLDLEDVNGDTLLRYRLWKEQGGKCLYTGKAIHIRQIAATDNSVQVDHILPWSRFGDDSFNNKTLCLASANQQKKRSTPYEWLSGQTGDAWNAFVQRIETNKELRGFKKRNYLLKNAKEAEEKFRSRNLNDTRYAARLFAEAVKLLYAFGERQEKGGNRRVFTRPGALTAALRQAWGVESLKKQDGKRINDDRHHALDALTVAAVDEAEIQRLTKSFHEWEQQGLGRPLRRVEPPWESFRADVEATYPEVFVARPERRRARGEGHAATIRQVKERECTPIVFERKAVSSLKEADLERIKDGERNEAIVEAIRSWIATGRPADAPPRSPRGDIITKIRLATTIKAAVPVRGGTAGRGEMVRADVFSKPNRRGKDEWYLVPVYPHQIMNRKAWPKPPMRSIVANKDEDEWTEVGPEHQFRFSLYPRSNIEIIRPSGEVIEGYFVGLHRNTGALIPTPVGPDSYVIA

SEQ ID NO: 74 - protein, 1368 aa, Streptococcus pyogenes
MDKKYSIGLDIGTNSVGWAVITDDYKVPSKKFKVLGNTDRHSIKKNLIGALLFDSGETAEATRLKRTARRRYTRRKNRICYLQEIFSNEIAKVDDSFFHRLEESFLVEEDKKHERHPIFGNIVDEVAYHEKYPTIYHLRKKLADSTDKADLRLIYLALAHMIKFRGHFLIEGDLNPDNSDVDKLFIQLVQTYNQLFEENPINASRVDAKAILSARLSKSRRLENLIAQLPGEKRNGLFGNLIALSLGLTPNFKSNFDLAEDAKLQLSKDTYDDDLDNLLAQIGDQYADLFLAAKNLSDAILLSDILRVNTEITKAPLSASMIKRYDEHHQDLTLLKALVRQQLPEKYKEIFFDQSKNGYAGYIDGGASQEEFYKFIKPILEKMDGTEELLAKLNREDLLRKQRTFDNGSIPHQIHLGELHAILRRQEDFYPFLKDNREKIEKILTFRIPYYVGPLARGNSRFAWMTRKSEETITPWNFEEVVDKGASAQSFIERMTNFDKNLPNEKVLPKHSLLYEYFTVYNELTKVKYVTEGMRKPAFLSGEQKKAIVDLLFKTNRKVTVKQLKEDYFKKIECFDSVEISGVEDRFNASLGTYHDLLKIIKDKDFLDNEENEDILEDIVLTLTLFEDREMIEERLKTYAHLFDDKVMKQLKRRRYTGWGRLSRKLINGIRDKQSGKTILDFLKSDGFANRNFMQLIHDDSLTFKEDLQKAQVSGQGDSLHEHIANLAGSPAIKKGILQTVKVVDELVKVMGRHKPENIVIEMARENQTTQKGQKNSRERMKRIEEGIKELGSDILKEYPVETTQLQNEKLYLYYLQNGRDMYVDQELDINRLSDYDVDHIVPQSFLKDDSIDNKVLTRSDKNRGKSDNVPSEEVVKKMKNYWKQLLNAKLITQRKFDNLTKAERGGLSELDKAGFIKRQLVETRQITKHVAQILDSRMNTKYDENDKLIREVRVITLKSKLVSDFRKDFQFYKVREINNYHHAHDAYLNAVVGTALIKKYPKLESEFVYGDYKVYDIRKMIAKSEQEIGKATAKYFFYSNIMNFFKTEITLANGEIRKRPLIETNGETGEIVWDKGRDFATVRKVLSMPQVNIVKKTEVQTGGFSKESILPKRNSDKLIARKKDWDPKKYGGFDSPTVAYSVLVVAKVEKGKSKKLKSVKELVGITIMERSSFEKDPVDFLEAKGYKEVRKDLIIKLPKYSLFELENGRKRMLASAGELQKGNELALPSKYVNFLYLASHYEKLKGSPEDNEQKQLFVEQHKHYLDEIIEQISEFSKRVILADANLDKVLSAYNKHRDKPIREQAENIIHLFTLTNLGAPAAFKCFDTTIGRNRYKSIKEVLDATLIHQSITGLYETRIDLSQLGGD

SEQ ID NO: 75 - protein, 1504 aa, Bacteroides dorei
MKNIVGLDLGTNSIGWAVVNGSVNDDGSEQLVKIQASGSRIIPMDAAMIGDFNKGNSISQTAERTRLRGVRRLSERYLLRRERLHRILDILGFLPFHFAQDLDRHGKIVKGKEPKLAWRKNEAGQFEFIFQDSFKEMLEDFKLNYPNLITDDKKVPYDWTIYYLRKKGLTSKISKEELAWILLNFNQKRGYYQLRGEEEEENKDKLVEFYALKVVAVEDSGEKKGKDIWYNVHLENGWVYRRTSNMSLDWVGKTKEFIVTTDLEKDGTPKKDKEGNVKRSFRAPKEDDWSLVKKKTEADIDQTHKTVGAYIYDTLLGNPSQKIRGRLVRTIERKYYKEELKLILEKQKEFHLELQDRALYAACIEELYPINEAHRNNVGNRDFTYLFLEDILFYQRPLKSKKSLIDNCPYEENQGLDKETGEIKSFPVKCIAKSHPLFQEFRLWQFIINLRIYRKDLAQDVDVTNELLKTEEDYVALFDWLNGKKEIDQKAFLKYPVFGLKKEIENYRWNYVQDKPYPCNETRSLMLARLEKCDISIEFLTKENEEALWHILYSVEDKNEIVKALQKFADKHDLNASFVDVFQKFPPFKKEYGSYSAKAIKKLLPLMRMGKYWSENSIDKGTRERIDKIITGEYDEKIENRVREKAIHLADVSDFKGLPLWLVCYIVYGRHSEAKEIIQWKSPADIDSYLRSFKQHSLRNPIVEQIIIETLRVVRDIWKQVGNIDEIHVELGREMKNPADKRKKMTQQMSENENTNLRIKYLLTEFLNPEYEVENVRPYSPSQQDILRIYEEGVLNSVSDLPEEISDILKKFTETDLKKRPSRSEVLRYKLWLEQKYRSPYTGEVIPLGKLFTPAYEIEHVIPQSYYFDDSFSNKVICEAEVNKLKSNLLGHEFIVKHHGEIVELPFGKKVRIFTVDEYEQFVKDNYSRTRSKMKKLLMDDIPEEFVTRQLNDSRYISKVVKSLLSNIVREKGEEEAISKNVIPCTGGVTDRLKKDWGINEVWNKIILPRFQRLNELTGTNKFTTKNVGIQEIPTMPLELQKGFNKKRIDHRHHAMDAIIIACANRNIINYLNNKSATAKAELSRYDLQKMLCDKAKTDNNGNYKWVIRKPWASFTQDTYLALENIIVSFKQNLRVINKATNRFLHYNEEGKKIFVKQGKGDNWAIRKSMHKDTVFGEVNLRRIKTVALNEAMKNPQSIVVKDFKRKLLELWNLGFDAKRIKKYFEDNRETWSDINLSKIEVYYFSKDTKDRFFATRKPLDTSFDRKKIENNITDTGIQKILLRHLELKDNNPDIAFSPDGIDEMNRNIIQLNNGKYHQPIIKIRWYEQADKFAVGQTGNKSSKFVEAAKGTNLFFAVYESNILDKKTNTIIKKRNYATIPLNVAIERQKQGLPVAPEDENGNDPIFVLSPNDLVYLPTDDELANGIIAQPLDRGRIYKMVSSSGEQCFFIKHIVANVLVDKFEFSPLNKMERALTGEMIKMICIPIKVDRLGNVLESSSSYKK

SEQ ID NO: 76 - protein, 1426 aa, Capnocytophaga sputigena
MKNILGLDLGITSISFAHIVEDENKEKSEIKELGVRIVSLTTDEQSDFEKGKSITTNANRTLKHGARLNLDRYQQRRKYLIDLLQKANLITSSSILAENGKNTTHSTWQLRAKAVTERIEKEEFARVLLAINKKRGYKSSRKAKTEDEGQAIDGMAIAKRLYDENLTPGQLSLQLLQQNKKLLPDFYRSDLQREFDLVWNFQKQFYPDILTDSFYKELQGKGKDATSKAFSKRYHFDTAENKGSKESVRLQAYQWRAEAISKQLSKEEVAYVLTEINNNLNNASGYLGAISDRSKELYFNRQTVGQYLYAQLQENRHNSLKNKVFYRQDYLDEFERIWETQASFHKELTDELKKQIRDVVIFYQRKLKSQKGLISFCEFESKEIEIEKDGKTITKTIGARVVPKSSPLFQEFKIWQILNNVTCKRKGIRKKKSSAKSTELDLFNEPSQTIFSLDMECKQLLFDELNLKGDLKSDKVLKLLGYSPQEWEINYNQLEGNRTQKALYEAYLKIVEMEAHDVKDILQIKSAKDDWSLDESPLSASEIKEKVKDIFQALGICTKILYFDPLLPVKEFEKQDSYQLWHLLYSYESDDSTSGNETLYRILEKKYAFKREHARILANVALQDDYGSLSTKAIRKIYPNIKENQYSKACELAGYKHSKLSLTTEELEARELKNIIPLLKKNALRNPVVEKILNQMINVVNALIEKNSERDAEGKITKYFHFDEIRIELARELKKNAQKRYEMTQNINKAKLEHQKISEILQKKFGIKNPTKSDIIRYRLYQELEHNGYKELYTNAPIARDMLFSKNIEIEHIVPKARVFDDSFSNKTLTFHRINSNKGEYTAFDYITSLNSEEELNQYLTRVENAYKTKSISLTKYKNLLKKASEIGDGFINRDLRDTQYIAKKAKEILFQVTKNVLSTSGSITDRLREDWGLVDVMKELNMPKYQSLGLTEVEERKEGNKVTVIKNWTKRNDHRHHAMDALTVAFTKPSYIQYLNHLNARKDENNKNYSVILAIEEKETIKVPTNNGKNKRVFIEPIPNFRQVAKKHLEEIFISHKAKNKVVTKNVNKPAGTDKQQITLTPRGQLHKETIYGKYQYYVNKEEKVGVKFDERTITKVSNPLYREALLKRLQANDNDPKKAFTGKNALSKNPIYLDETKTKTLPEKVNLTYLEEDFSIRKDISPDNFKDLKSIEKVIDQGVKRILIKRLQDYDNDPKKAFVDLEKNPIWLNKEKGIAIKRVTISGVSNAQPLHIGKDHLGKTTLNKEGNEIPVDYVSTGNNHHVAIYRDKEGNLQEQIVSFFEAVVRTQQGLPIIDKTYKQEEGWQFLFTMKQNEMFVFPNATTGFNPAEIDLLDPKNKKLISPNLFRVQKIATKDYFFRHHLETNVETDNVLKNTTWKREGLSGLKDIVKVRINHLGDIVSIGEY

SEQ ID NO: 77 - protein, 1443 aa, Parabacteroides johnsonii
MIKLLYLEKLKQYTMKKILGLDLGTSSIGWALVNEAENSDEVSSIIKLGVRVNPLTVDEMQNFEKGKSITTNADRTLKRSMRRNLQRYKLRRDALIELLKKVGFITDKTILSEQGNRTTFETYRLRAKAAEEEISLKELARVLLMINKKRGYKSSRKAKGEEEGALIDGMEIAKKLYDEDLTPGQLCLQLLESGKKFFPDFYRSDLQEEFNKIWDFQKQFNLFSFCDVAKEEVKGKNKSQTWAILAKYFVETKKVNVWNEHEAQTENREEVYKLVGLKRTVKGEELKKENYRWRVQALTEQLDLEKIAVVLQEINGQISASSGYLGAISDRSKVLYFNRQTVGQYQMAELNKNPNMSLRNMVFYRQDYLDEFNVIWEKQAEFHKELTPELKKEIRDIIIFYQRRLKSQKGLISFCEFENREVVVEKEGKKQTKIIGCKVIPRSHPLFQEFKIWQTLNNIEVFVGEKKGKRKKSNVSSDLFGDTEDALITEGRRFLYQEEKKILAKELSIKKGLTKAEILRLLFENPQELDINFKQIDGNQTGFALFSAYSNMIEKYGYEPLDFKKPAEDLISQLKTVFTDLGWNTDLLFIDLDKENKEWEKQPYFRLWHLLYSFEGDNTPTGNGKLIEKIMQLCGIEKEYAIELANVSLQDDYGSLSAKAIKKILLYLKEGNQYDMACEYAGYRHSKSSLTKEEIENKVLKDKLEILPKNSLRNPVVEKILNQMVNVINTVMEVYGRPDEIRVELARELKKSAKEREELTKAVAKNTREHEEIRKVLQSEFGMINVSRNDIIRYKLYEELKDNGYKTLYSNQYIPREKLFSKEIDIEHIIPQSRLFDDSLSNKTLEYKSINIEKGNKTAYDFVKEKYGEEGLQQYLNRCENLCKDKKAKLRKLKMELNEIPDGFIDRDLRNTQYIAKKALSMLTEICRRVVATTGSITDKLREDWQLVDVMKELNLPKYEALGLVEVYEDKDGRKIKRIKDWTKRNDHRHHAMDALTVAFTKDVFIQYFNNKNAAWESDSKEHTNIVGIKTRYFESGKAVPPIPLGQFRVEAKCHLENLLVSIKAKNKVVTTNVNCIKKKGGTYKNTQQTPRGQLHLETIYGSHNQYVTKIEKVNASFDAVKIATVSKQDYRNALLKRLEVFGNDPKKAFTGKNSLEKNPIYLDRAQTIQVPDKVQTVELETAYTIRKPVDPTLNVDKVVDKKIRLILEQRLKEYGGDAKKAFVNLDENPIWLNEEKGISIKRVTIRGISKAQALHDKKDKDGNFILDETGKRIPVDFVNTGNNHHVAIYRKPVLDKKGQVIFDDEGNPMYELDEDVVPFFEAVTRANLGIPIIDKDYKKSEGWQFLFSMKQNEYFVFPNEKTGFNPKEVDLLDPDNYAMISPNLFRVQKIGLNDYTFRHHLETTIQNDLKFITWIRCGKSGIKDIVKVRINHIGQIVSVGEY

SEQ ID NO: 78 - protein, 984 aa, Campylobacter jejuni
MARILAFDIGISSIGWAFSENDELKDCGVRIFTKVENPKTGESLALPRRLARSARKRLARRKARLNHLKHLIANEFKLNYEDYQSFDESLAKAYKGSLISPYELRFRALNELLSKQDFARVILHIAKRRGYDDIKNSDDKEKGAILKAIKQNEEKLANYQSVGEYLYKEYFQKFKENSKEFTNVRNKKESYERCIAQSFLKDELKLIFKKQREFGFSFSKKFEEEVLSVAFYKRALKDFSHLVGNCSFFTDEKRAPKNSPLAFMFVALTRIINLLNNLKNTEGILYTKDDLNALLNEVLKNGTLTYKQTKKLLGLSDDYEFKGEKGTYFIEFKKYKEFIKALGEHNLSQDDLNEIAKDITLIKDEIKLKKALAKYDLNQNQIDSLSKLEFKDHLNISFKALKLVTPLMLEGKKYDEACNELNLKVAINEDKKDFLPAFNETYYKDEVTNPVVLRAIKEYRKVLNALLKKYGKVHKINIELAREVGKNHSQRAKIEKEQNENYKAKKDAELECEKLGLKINSKNILKLRLFKEQKEFCAYSGEKIKISDLQDEKMLEIDHIYPYSRSFDDSYMNKVLVFTKQNQEKLNQTPFEAFGNDSAKWQKIEVLAKNLPTKKQKRILDKNYKDKEQKNFKDRNLNDTRYIARLVLNYTKDYLDFLPLSDDENTKLNDTQKGSKVHVEAKSGMLTSALRHTWGFSAKDRNNHLHHAIDAVIIAYANNSIVKAFSDFKKEQESNSAELYAKKISELDYKNKRKFFEPFSGFRQKVLDKIDEIFVSKPERKKPSGALHEETFRKEEEFYQSYGGKEGVLKALELGKIRKVNGKIVKNGDMFRVDIFKHKKTNKFYAVPIYTMDFALKVLPNKAVARSKKGEIKDWILMDENYEFCFSLYKDSLILIQTKDMQEPEFVYYNAFTSSTVSLIVSKHDNKFETLSKNQKILFKNANEKEVIAKSIGIQNLKVFEKYIVSALGEVTKAEFRQREDFKK

SEQ ID NO: 79 - protein, 1082 aa, Neisseria meningitidis
MAAFKPNPINYILGLDIGIASVGWAMVEIDEDENPICLIDLGVRVFERAEVPKTGDSLAMARRLARSVRRLTRRRAHRLLRARRLLKREGVLQAADFDENGLIKSLPNTPWQLRAAALDRKLTPLEWSAVLLHLIKHRGYLSQRKNEGETADKELGALLKGVADNAHALQTGDFRTPAELALNKFEKESGHIRNQRGDYSHTFSRKDLQAELILLFEKQKEFGNPHVSGGLKEGIETLLMTQRPALSGDAVQKMLGHCTFEPAEPKAAKNTYTAERFIWLTKLNNLRILEQGSERPLTDTERATLMDEPYRKSKLTYAQARKLLGLEDTAFFKGLRYGKDNAEASTLMEMKAYHAISRALEKEGLKDKKSPLNLSPELQDEIGTAFSLFKTDEDITGRLKDRIQPEILEALLKHISFDKFVQISLKALRRIVPLMEQGKRYDEACAEIYGDHYGKKNTEEKIYLPPIPADEIRNPVVLRALSQARKVINGVVRRYGSPARIHIETAREVGKSFKDRKEIEKRQEENRKDREKAAAKFREYFPNFVGEPKSKDILKLRLYEQQHGKCLYSGKEINLGRLNEKGYVEIDHALPFSRTWDDSFNNKVLVLGSENQNKGNQTPYEYFNGKDNSREWQEFKARVETSRFPRSKKQRILLQKFDEDGFKERNLNDTRYVNRFLCQFVADRMRLTGKGKKRVFASNGQITNLLRGFWGLRKVRAENDRHHALDAVVVACSTVAMQQKITRFVRYKEMNAFDGKTIDKETGEVLHQKTHFPQPWEFFAQEVMIRVFGKPDGKPEFEEADTPEKLRTLLAEKLSSRPEAVHEYVTPLFVSRAPNRKMSGQGHMETVKSAKRLDEGVSVLRVPLTQLKLKDLEKMVNREREPKLYEALKARLEAHKDDPAKAFAEPFYKYDKAGNRTQQVKAVRVEQVQKTGVWVRNHNGIADNATMVRVDVFEKGDKYYLVPIYSWQVAKGILPDRAVVQGKDEEDWQLIDDSFNFKFSLHPNDLVEVITKKARMFGYFASCHRGTGNINIRIHDLDHKIGKNGILEGIGVKTALSFQKYQIDELGKEIRPCRLKKRPPVR

SEQ ID NO: 80 - protein, 1021 aa, Clostridium cellulolyticum
MKYTLGLDVGIASVGWAVIDKDNNKIIDLGVRCFDKAEESKTGESLATARRIARGMRRRISRRSQRLRLVKKLFVQYEIIKDSSEFNRIFDTSRDGWKDPWELRYNALSRILKPYELVQVLTHITKRRGFKSNRKEDLSTTKEGVVITSIKNNSEMLRTKNYRTIGEMIFMETPENSNKRNKVDEYIHTIAREDLLNEIKYIFSIQRKLGSPFVTEKLEHDFLNIWEFQRPFASGDSILSKVGKCTLLKEELRAPTSCYTSEYFGLLQSINNLVLVEDNNTLTLNNDQRAKIIEYAHFKNEIKYSEIRKLLDIEPEILFKAHNLTHKNPSGNNESKKFYEMKSYHKLKSTLPTDIWGKLHSNKESLDNLFYCLTVYKNDNEIKDYLQANNLDYLIEYIAKLPTFNKFKHLSLVAMKRIIPFMEKGYKYSDACNMAELDFTGSSKLEKCNKLTVEPIIENVTNPVVIRALTQARKVINAIIQKYGLPYMVNIELAREAGMTRQDRDNLKKEHENNRKAREKISDLIRQNGRVASGLDILKWRLWEDQGGRCAYSGKPIPVCDLLNDSLTQIDHIYPYSRSMDDSYMNKVLVLTDENQNKRSYTPYEVWGSTEKWEDFEARIYSMHLPQSKEKRLLNRNFITKDLDSFISRNLNDTRYISRFLKNYIESYLQFSNDSPKSCVVCVNGQCTAQLRSRWGLNKNREESDLHHALDAAVIACADRKIIKEITNYYNERENHNYKVKYPLPWHSFRQDLMETLAGVFISRAPRRKITGPAHDETIRSPKHFNKGLTSVKIPLTTVTLEKLETMVKNTKGGISDKAVYNVLKNRLIEHNNKPLKAFAEKIYKPLKNGTNGAIIRSIRVETPSYTGVFRNEGKGISDNSLMVRVDVFKKKDKYYLVPIYVAHMIKKELPSKAIVPLKPESQWELIDSTHEFLFSLYQNDYLVIKTKKGITEGYYRSCHRGTGSLSLMPHFANNKNVKIDIGVRTAISIEKYNVDILGNKSIVKGEPRRGMEKYNSFKSN

SEQ ID NO: 81 - protein, 1131 aa, Acidovorax ebreus
MAQHVFGLDIGIASVGWAILGEQRIIDLGVRCFDKAETAKEGDPLNLTRRQARLLRRRLYRRAWRLTQLSRLLKRKGLIADAKLFAKAPSYGDSAWELRRQGLDRLLTPLEWARVIYHQCKHRGFHWTSKAEEAKADSDAEGGRVKQGLAHTKALMQAKNYRSAAEMVLAEFPDAQRNKRGQYDKALSRVLLGEELALLFATQRRLGNPHASDFFEKLILGDGDRKSGLFWQQKPALSGADLLKMLGKCTFEKGEYRAPKASFSVERHVWLTRLNNLRIVVDGRSRPLNEAERQAALLLPYQTETSKYKTLKNAFIKAGLWGDGVRFGGLAYPSQAQIDAEKTKDPEDQFLVKLPAWHELRKAFKAAGHEALWQQISTPALDGDPTLLDQIATVLSVYKDGAEVVQQLRQLALPEPAASIAVLEKISFDKFSSLSLKALRRIVPLMQSGLRYDEAVAQIPEYGHHSQRIEPGAAKHLYLPPFYEAQRKYAGKGDHIGSMQFRDDADIPRNPVVLRALNQARKVVNALIREYGSPIAVNIEMARDLSRPLDERNKVKRAQEEFRDRNDRARSEFERDFGYKPKAAAFEKWMLYREQLGQCAYSQQPLDIQRVLDDHNYAQVDHALPYSRSYDDSKNNKVLVLTHENQNKGNRTAFEYLTSFPDGEDGERWRTFVAWVQGNKAYRMAKRNRLLRKNYGVDESKGFIDRNLNDTRYICKFFKNYVEEHLQLAARADGDTARRCVVVNGQLTAFLRARWGLTKVRGDSDRHHALDAAVVAACTHGMVKALADYSRRKEISFLQEGFPDPETGEILNPAAFDRARQHFPEPWTHFAHELKARLFTDDLAALREDMQRLGSYTTEDLGRLRTLFVSRAPQRRSGGAVHKETIYAQPESLKQQGGVIEKILLTSLKLQDFDKLLNPESNDHFVEPHRNERLYAAIRQRLEQFGGRADKAFGPDNLFHKPDKNNQPTGPVVRSIKLVRGKQTGIPIRGGLAKNDSMLRVDIFTKAGKFHLVPVYVHHRVTGLPNRAIVAFKDEDEWTLIDESFAFLFSVYPNDYVKVTLKKEQQSGYYSGADRSTGAMNLWAHDRAASVGKDGLIRGIGVKTALSVEKFNVDVLGRIYLAPPETRSGLA

SEQ ID NO: 82 - protein, 1122 aa, Streptococcus suis
MSNGKILGLDIGIASVGVGVIDAQTGEIIHASSRIFPSANAANNAERRTFRGSRRLIRRKKHRIKRLDDLFNDFHINLDGEMSTDNPYVLRVKGLSQKLTVEELYISIKNIMKRRGISYLDDAESDNEAGRSDYAKAIERNRQLLTSKTPGEIQLERLEKYGQLRGNFTIIDEEGQSQQIINVFSTSDYVKEVEKILDCQKMYHKFISDEFCDKLIELLREKRKYYVGPGNEKSRTDYGIYRTDGTTLENLFGILIGKCTFYPDQYRSSRASYTAQEFNFLNDLNNLTVPTETKKLSQEQKEFLVNYAKETSVLGAGKILQQIAKLADCKVEDIRGYRLDNKDKPELHTFETYRAMKGLVPLVDIGVLSREQLDILADILTLNTDFEGIREALKKQLPNVFDEKQVKGLASFRKSKSQLFAKGWHNLSQKIMLEVIPELYATSDEQMTILTRLGKFEKSSVAEYPSSINVDEITDEIYNPVVAKSIRQTIKIINASIKKWGEFDQIVIEMPRDRNEDEEKKRIADGQKANAKEKADSILRAAELYCAGKVLPDYVYNGHNQLATKIRLWYQQGERCIYTGQPISIHDLIHNQNQYEIDHILPLSLTFDDSLSNKVLVLATANQEKAQRTPYNYLKSATSAWSYREFKDYVTKRKGIGKKKCEYLTFEEDINGFEVRSKFIQRNLVDTRYASKVILNALQDYFKISGIQTKVSVVRGQFTSQLRHKWGIEKTRETYHHHAVDALIIAASSQLRLWKKQESPLVVDYQEGRQVDLETGEILELTDEQYKELVYQPPYQGFVNTISSSAFDNEILFSYQVDSKVNRKISDATIYATRNAQLGKDKTEGIYVLGKIKDIYTQAGYEAFLKRYTKDKTSFLMYHKDLDTWEKVIEIILRDYREYDEKGKEIGNPFERYRRENGYVKKYSRKGNGTAIKSLKYYDNKLGNHIDITPENSRNAVVLQSLKPWRTDVYFNKETGKYEFLGIKYSDLSFEKGTGEYGISQEKYDSIKIAEGVAKKSIFKFTLYKQDLLFIKDIENNFGKLLRFTSKNDTSKHYVELKPYDKNKFGTEEPLLPVLGNVAKSGQCIKGLNKSNISIYKVRTDILGYRHFIKQEGEHPQLKFKK

SEQ ID NO: 83 - protein, 1509 aa, Bacteroides coprophilus
MKKTLGLDLGTNSIGWAVINSNIDSEGKEKLVGISSCGSRIIPMDATTLGDFGKGNTKSPVAERTRLRGIRRLLERSLLRRERLHRVLSVMGFLPEHYASQLDRYGKFLPETEPKLAWYKDDSGRYQFLFQKSFHEMLEDFRQHQPELVAGEKKIPYDWTIYYLRKKALSQEITKEELAWILLNFNQKRGYYQLRGEEEQEENNKSVEYHALKVVSVEDSGERKGKDIWYNVTLENGWVYRRASNIPLDWTGKVKEFVVTTELDDAGNPKKDKEGNVKRSFRAPKEDDWGLLKTRTQAQIDESGKTVGTYIYESLLCMPNQKIRGKLVRTIERKYYKDELRQILVKQSEFHAALQDHNLLLSCIEELYPNNEAHRRLLSASSFIYFLIEDILFYQRPLKSQKGLIDNCPYESHIYKDKKDGSLHHVPLKCVSKSHPLFQEFRLWQFLSNLRIYQRERMMDGSLKLDVDVTREFLPSEEDYVKLFDWLNERKEISQKFLLAYKPFGLKKNEQANYRWNYVEDKSYPCNETRAEIKSRLSKAGVPEEFLTEEKEEALWHILYSISDKKELTKALGTFAAKNCLNESFVEVFAKIPPFESNYAAYSLKAIRKLLALMRMGKYWNEQAIDRQTRDRIEKILTGEYDETIRSRVREKAMLLTDISSFRGLPLWLACYIVYDRHSESKELVKWETPADIDHFLSKFKQNSLRNPIVEQVITESLRTVRDIWKQEGKIDEIHVELGREMKNPAKERARITAQVQENENTNLRIKALLAEFMNPEFEIENVHPYSPGQQEILRIYEDGVLSGIAEKDLPDDITAILKKFRENDVKKRPTTSEVLRYKLWLEQRYRSPYTGRVIPLGKLFTPAYEIEHVIPQSRYFDDSISNKVICESAVNKLKDNCLGYEFIKKHSGEMVELGNGETVPVFSVEEYERFVKESYFGNSKKMKKLLLEDIPDSFIERQLNDSRYISRVVTSLLSNLVCEEGEQDGLSKNVIVCTGGITDRLKKDWGVQEVWNRIILPRFLRLNEITGRTDFTSTSVNGHLLPALPLYLQKGFNKKRIDHRHHAMDAIVIACANRNIVNYLNNSSARKNSEISRYDLQRLLCEKVKTDANGNYKWILRKPWETFTQDVYAALTNIVVSFKQNLRVINRTTNYYQHYNEAGEKRMIPQTKGDRWAIRKPMHKDTVYGEVNLRKEKTLPLRDVVKNPSIVVDKSLKNKLYELLKSQYDLKAIAKYFETHQDVWADVNLKKIKVYYFTKETNERFFATRKSLDPSFDQKKIEEEVTDTGVQKILLHHLQQNNNDPDMAFSPDGIDRMNQNMTILNDGKWHQPIYKVRTYEKADKFAVGESGNKAKKFVEAAKGTNLFFAVYESVQEDEAIGKQVCKRTFATIPLNEVIKRKKQGLPAAPEDLNGNLPKFVLSPNDLVYLPTEEERNSSRIIQPLDRERIYKMVSSSGSQCFFIKVFVANSIWDKNEYSSLNKMERAITNEMIKEICVPIKIDRLGNVSLIQI

SEQ ID NO: 84 - protein, 1219 aa, Bacteroides cellulosilyticus
MKEEVRGKNRSQTWAILAKFFVWSEKESVWNEKEARTEERVKEYKLVGLKRDTKGNELKLENYRWRVQALSEQLNPEIVAIVLQEINGQISASSGYLGAISDRSKQLYFNRQTVGQYLMSELEKDPNVSLRNRVFYRQDYLDEFDRIWEKQAEFHEELTVELKKEIRDIIIFYQRRLKSQKGLISFCEFEKREVVVEEDGRKKNKTVGCRVIPRSHPLFQEFKIWQTLNDIEVFAWDKQSKRKKADKSSILFDNSEDALLVEGKRFLYQEEKELLAKELFVKESMKKAEVLKLLFENYQELDLNFKQIDGNHTGFALFSAYSKMIEKYGYEPVDFKRSADEIIEKLETIFTNLGWNTELLSIDLSKEDKELERQSYFRLWHLLYSFEGDNTPTGNGKLLEKIMQLCDVEKEYAVELANVSFQEDYGSLSAKAIKKILPYLKEGNQYDVACDYAGYRHSRSSLTKDEIENKILKDKLEILPKNSLRNPVVEKILNQMVNLINTLIDTYGKPDEIRVELARELKKNAKEREELTKSIARNTREHDEIRQLLRTEFGMMNVSRNDIIRYKLYEELKDNGYKTLYSNEYIPREKIFSKEIDIEHVIPQARLFDDSLSNKTLEYRAINIEKGNKTAYDFVKEKYGNDGLEKFLNRCETLFKDKRTKLRKLKMEEKDIPEGFIDRDLRNTQYISKKAFAMLNEISRRVVATTGSITDKLREDWQLVDLMKELNLPKYEKLGMVEMFEDKDGRKIKKITDWTKRNDHRHHAVDALTVAFTKDVFIQFYNNKNAAWMPASKEHANITGIKARYFENGKALAPMPLAQFRAEAKRHLENLLVSIKAKNKVITSNVNRTKNKNGENRKLQQTPRGQLHLETVYGSHRQYATKIEKVNAAFDVTKIATVSKLAYRNALLKRLEAFGNDPKKAFTGKNTLEKNPLYLDENQTEMVPEKVQTVEFETVYTIRKPIDPNLSIDKVVDVKIRSVLEKRLKEYGGDAKKAFVNLDENPIWLNEAKGISIKRVSIRGISNAQSLHEKKDKDGNLILGKEGRKIPVDFVNTGNNHHVAIYKKPVLDKVGQVVLDEEGNPKYELDEVVVSFFDAVTRANLGQPIIDKDYRRSEGWQFLFSMKQNEYFVFPNDKTGFNPKEVDLLNPENYALISPNLFRVQKFAYKNYVFRHHLETTIKDTSSTLKGITWTDFRSSKGLDKIVKVRVDHIGQIVSIGEY

SEQ ID NO: 85 - protein, 1329 aa, Catenibacterium mitsuokai
IVDYCIGLDLGTGSVGWAVVDMNHRLMKRNGKHLWGSRLFSNAETAANRRASRSIRRRYNKRRERIRLLRAILQDMVLEKDPTFFIRLEHTSFLDEEDKAKYLGTDYKDNYNLFIDEDFNDYTYYHKYPTIYHLRKALCESTEKADPRLIYLALHHIVKYRGNFLYEGQKFNMDASNIEDKLSDIFTQFTSFNNIPYEDDEKKNLEILEILKKPLSKKAKVDEVMTLIAPEKDYKSAFKELVTGIAGNKMNVTKMILCEPIKQGDSEIKLKFSDSNYDDQFSEVEKDLGEYVEFVDALHNVYSWVELQTIMGATHTDNASISEAMVSRYNKHHDDLKLLKDCIKNNVPNKYFDMFRNDSEKSKGYYNYINRPSKAPVDEFYKYVKKCIEKVDTPEAKQILNDIELENFLLKQNSRTNGSVPYQMQLDEMIKIIDNQAEYYPILKEKREQLLSILTFRIPYYFGPLNETSEHAWIKRLEGKENQRILPWNYQDIVDVDATAEGFIKRMRSYCTYFPDEEVLPKNSLIVSKYEVYNELNKIRVDDKLLEVDVKNDIYNELFMKNKTVTEKKLKNWLVNNQCCSKDAEIKGFQKENQFSTSLTPWIDFTNIFGKIDQSNFDLIENIIYDLTVFEDKKIMKRRLKKKYALPDDKVKQILKLKYKDWSRLSKKLLDGIVADNRFGSSVTVLDVLEMSRLNLMEIINDKDLGYAQMIEEATSCPEDGKFTYEEVERLAGSPALKRGIWQSLQIVEEITKVMKCRPKYIYIEFERSEEAKERTESKIKKLENVYKDLDEQTKKEYKSVLEELKGFDNTKKISSDSLFLYFTQLGKCMYSGKKLDIDSLDKYQIDHIVPQSLVKDDSFDNRVLVVPSENQRKLDDLVVPFDIRDKMYRFWKLLFDHELISPKKFYSLIKTEYTERDEERFINRQLVETRQITKNVTQIIEDHYSTTKVAAIRANLSHEFRVKNHIYKNRDINDYHHAHDAYIVALIGGFMRDRYPNMHDSKAVYSEYMKMFRKNKNDQKRWKDGFVINSMNYPYEVDGKLIWNPDLINEIKKCFYYKDCYCTTKLDQKSGQLFNLTVLSNDAHADKGVTKAVVPVNKNRSDVHKYGGFSGLQYTIVAIEGQKKKGKKTELVKKISGVPLHLKAASINEKINYIEEKEGLSDVRIIKDNIPVNQMIEMDGGEYLLTSPTEYVNARQLVLNEKQCALIADIYNAIYKQDYDNLDDILMIQLYIELTNKMKVLYPAYRGIAEKFESMNENYVVISKEEKANIIKQMLIVMHRGPQNGNIVYDDFKISDRIGRLKTKNHNLNNIVFISQSPTGIYTKKYKL

SEQ ID NO: 86 - protein, 1152 aa, Roseburia inulinivorans
MNAEHGKEGLLIMEENFQYRIGLDIGITSVGWAVLQNNSQDEPVRITDLGVRIFDVAENPKNGDALAAPRRDARTTRRRLRRRRHRLERIKFLLQENGLIEMDSFMERYYKGNLPDVYQLRYEGLDRKLKDEELAQVLIHIAKHRGFRSTRKAETKEKEGGAVLKATTENQKIMQEKGYRTVGEMLYLDEAFHTECLWNEKGYVLTPRNRPDDYKHTILRSMLVEEVHAIFAAQRAHGNQKATEGLEEAYVEIMTSQRSFDMGPGLQPDGKPSPYAMEGFGDRVGKCTFEKDEYRAPKATYTAELFVALQKINHTKLIDEFGTGRFFSEEERKTIIGLLLSSKELKYGTIRKKLNIDPSLKFNSLNYSAKKEGETEEERVLDTEKAKFASMFWTYEYSKCLKDRTEEMPVGEKADLFDRIGEILTAYKNDDSRSSRLKELGLSGEEIDGLLDLSPAKYQRVSLKAMRKMQPYLEDGLIYDKACEAAGYDFRALNDGNKKHLLKGEEINAIVNDITNPVVKRSVSQTIKVINAIIQKYGSPQAVNIELAREMSKNFQDRTNLEKEMKKRQQENERAKQQIIELGKQNPTGQDILKYRLWNDQGGYCLYSGKKIPLEELFDGGYDIDHILPYSITFDDSYRNKVLVTAQENRQKGNRTPYEYFGADEKRWEDYEASVRLLVRDYKKQQKLLKKNFTEEERKEFKERNLNDTKYITRVVYNMIRQNLELEPFNHPEKKKQVWAVNGAVTSYLRKRWGLMQKDRSTDRHHAMDAVVIACCTDGMIHKISRYMQGRELAYSRNFKFPDEETGEILNRDNFTREQWDEKFGVKVPLPWNSFRDELDIRLLNEDPKNFLLTHADVQRELDYPGWMYGEEESPIEEGRYINYIRPLFVSRMPNHKVTGSAHDATIRSARDYETRGVVITKVPLTDLKLNKDNEIEGYYDKDSDRLLYQALVRQLLLHGNDGKKAFAEDFHKPKADGTEGPVVRKVKIEKKQTSGVMVRGGTGIAANGEMVRIDVFRENGKYYFVPVYTADVVRKVLPNRAATHTKPYSEWRVMDDANFVFSLYSRDLIHVKSKKDIKTNLVNGGLLLQKEIFAYYTGADIATASIAGFANDSNFKFRGLGIQSLEIFEKCQVDILGNISVVRHENRQEFH

SEQ ID NO: 87 - protein, 686 aa, Coprococcus comes
MKKQDSPKNNMGYTAYNLNVLGYEEFAKRVELLFKDTDAVKRLNDSHMQMAEGFDLNALPGSPALRRGVSQAIKVLDDIVSVAGKAPDRIYLKVTRTASNSRKGKRTAKRSDKIKQALKALDADAAADLGAAKLLRELGMFDEKEINERIYLYFHQAGKCLYTGKPIDITRIASNDYYVDHVVPLAYRKDESLDNKVLVYAEASRYKSETLLVSPAVQRKMLPFWRMLRNAGLMSERKLNALIRTEISEGMLKSIIGRQFTENSWEAKLFTAAIAAKYPGTVVIPVKAGVIGAVRSRIGIPKSLKANQFYHAHDALLAAEVGRYMELAKPAFVHNRVKYEQYMRKIKLVNEENKKAPKSQLDFFAGGFFFDRVDKDTGEVYWNKDEEVERIYRACGWKNLRVTYAAFEDGGAFWKQTIYSPREKSKLIATKSDRPAEIYGGYSSQTFANFFVYEVMKKKVKQLRFGAVPAAIASKSDPDTYNAMLEMYARGLAKTAKEKFVRIVRARVLKNTMIELYGERFRIAGEKQVYPVRQMPLAIDEVYLLKGVETIAAAGNAGASAKIDFEKAAESLVGFWDLLLEKLPVNYPKLTVQLKLGLLKHPKDILAATSESEFPAIVYKIAEAEIQVMEQASGLRNMSDTKILGGNTFGGSLVFTFNKVLNDPKSKACFIDTTPAGLYEVKTKIW

SEQ ID NO: 88 - protein, 1105 aa, Actinomyces coleocanis
MDNKNYRIGIDVGLNSIGFCAVEVDQHDTPLGFLNLSVYRHDAGIDPNGKKTNTTRLAMSGVARRTRRLFRKRKRRLAALDRFIEAQGWTLPDHADYKDPYTPWLVRAELAQTPIRDENDLHEKLAIAVRHIARHRGWRSPWVPVRSLHVEQPPSDQYLALKERVEAKTLLQMPEGATPAEMVVALDLSVDVNLRPKNREKTDTRPENKKPGFLGGKLMQSDNANELRKIAKIQGLDDALLRELIELVFAADSPKGASGELVGYDVLPGQHGKRRAEKAHPAFQRYRIASIVSNLRIRHLGSGADERLDVETQKRVFEYLLNAKPTADITWSDVAEEIGVERNLLMGTATQTADGERASAKPPVDVTNVAFATCKIKPLKEWWLNADYEARCVMVSALSHAEKLTEGTAAEVEVAEFLQNLSDEDNEKLDSFSLPIGRAAYSVDSLERLTKRMIENGEDLFEARVNEFGVSEDWRPPAEPIGARVGNPAVDRVLKAVNRYLMAAEAEWGAPLSVNIEHVREGFISKRQAVEIDRENQKRYQRNQAVRSQIADHINATSGVRGSDVTRYLAIQRQNGECLYCGTAITFVNSEMDHIVPRAGLGSTNTRDNLVATCERCNKSKSNKPFAVWAAECGIPGVSVAEALKRVDFWIADGFASSKEHRELQKGVKDRLKRKVSDPEIDNRSMESVAWMARELAHRVQYYFDEKHTGTKVRVFRGSLTSAARKASGFESRVNFIGGNGKTRLDRRHHAMDAATVAMLRNSVAKTLVLRGNIRASERAIGAAETWKSFRGENVADRQIFESWSENMRVLVEKFNLALYNDEVSIFSSLRLQLGNGKAHDDTITKLQMHKVGDAWSLTEIDRASTPALWCALTRQPDFTWKDGLPANEDRTIIVNGTHYGPLDKVGIFGKAAASLLVRGGSVDIGSAIHHARIYRIAGKKPTYGMVRVFAPDLLRYRNEDLFNVELPPQSVSMRYAEPKVREAIREGKAEYLGWLVVGDELLLDLSSETSGQIAELQQDFPGTTHWTVAGFFSPSRLRLRPVYLAQEGLGEDVSEGSKSIIAGQGWRPAVNKVFGSAMPEVIRRDGLGRKRRFSYSGLPVSWQG

SEQ ID NO: 89 - protein, 1361 aa, Anaerococcus tetradius
MGNYYLGLDIGTNSVGWAVTDENYNIERFKKKNMWGIRLFDEAKTAESRRIHRQARRMRQRKIQRLNLLMELFDVEISKVDESFFIRKKESDLHYEDKSQDSRYALFNDKEFNDKDYHNKYPTIFHLIMDLIENDEKKDIRLLYLACHYLIKNRGHFIFEGQKFDVNSSLNNNINKLKSHLDQFYNICLDFDNDKLIEILVNQNLNISEKSKKIKELLRKTNLEVGIANLIAGGSIKLSNMFDDDELKNLDYNSLSFKNSNFDEGRELFEEVLEDRFELVEILKDIHDASVLETMLSSASISPDGGKYISSSMINSYNKHKRDLKLLKKIIKKYKKSEYDNIFRDENIKNNYLSYTRTGINKNKKVQAEDNTDSDGFYKYIVKILKDIKENDSDEDIKYILSEIDKKNFVPKQRTKENSVIPYQLREIELRKIIDNQSKYHKFLNEVDEKGISVKEKIISLLTFRIPYYIGPLNPSYNEEKNFTTSWVKRLAKGKVTPWNFEDMVDIDASREAFIENKLNKCSFLLDETVLPKDSLLYQEYMVLNELNNLKINGQSINTDLKKSIYEELFKKYKKVTRKRLISYIKEKENMSGDIVITGIDGDFKQGLKSYIAFKDIIGEKIDDDIYRKEVEKIIRDISLYGDDKSFIQKKIKNENKLDLSDDQISKIAKLKFKDWGRFSKKLLVGIKASDKNTGEIDNIIGFMRNYNYNIMQLMANVFTFKDEIEKLNSKYYTDEKINIDYLDDLYLSSPAKRMLWQSFQIVDEIKNIKNSDPKKIFIEMARSKEDKPTRKMSRKSRLEKLYTDSKKQFIKLFGPDEYDKLNNEIKNKSESDFRWDNLYLYYTQFGRCMYSLDPIDLEELSNKNLYDQDHIYPKSKIYDDSIENRVLVKKQLNLDKSNEYPIPDRVLNKDKNKLLAFWKMLNEKELIGDKKYARLIRKSPFTDEELGDFIARQLVETRQATKETANMLKRLCPDSKIVYVKAKNVSDFRRKFDILKCRSINDLHHAHDAYLNIVVGNVFDTKFTSNPLNFIKNNSKNRSYNLEKIYDYDVIRNEKIAWLAERKEENQDGSIATVLKNLSKNDIRVTRRTYIKCEDLFDENIVRKGNGKFPIKENNNKSDTNKYGGYSGIKNAYFVLLEDEKHNRILEAIPSFIYKKEKNGEKGSVINYLQNILGIKSAKILRDKIKIGSLLKIDKFPYNLAGKSGNGILISGGVQLILDKNTSKYIKKIENYKYKLDENKDYQINIFDKLSKEENIKLFDLFVDKFENSIYKNRVNIKLKEIKLARPKFEHLSIEEQIKTLTQMLILFGRENNAVNLEYIGLPKNTGKTKINKKINNKDIKIINQSITGLYETEEDLANI

SEQ ID NO: 90 - protein, 1377 aa, Lactobacillus brevis
MESNHDGEQVKYTLGLDIGTSSIGYAAIDKHQKPIRAKGKHVIGVRLFQEGQTAADRRAFRTTRRRLKRRKWRLNLLNRLFDPYLSEVDPNFLPRLRQSNLSPKDDNKHFNGSTLFPDKTDAAFYRQYPTMYHLRYALMTEKRKFDIREVYLAIHHIVKYRGNFLNSATVDSFKTSNIDFTSQFDRLNELYRQVILDEPFQINMDQVDEMTNKLLDNDALKLDTQKQVAKLLPVIYNDKPIDKQYTRIATEFSKAILGYKTKLDVILNLDTQNAKDWVIRLDDEDIDDKLPALVENLDESRQEIVTIIRDLYAQITLNAIVPKGKSLSESMVDKYNDHKDHLDLLMGLIHELGDDSAKGIKLREAYTQYVGKSDDKTLNQDDFYAAIKKNLDEDSKRSPKIQRLIEQASFMPKQRTSANGVIPHQLHQLELDRIIENQGRYYPFLKKPNPNTHKPNGGKYKLDELVAFRIPYYVGPLITKRDQEKTSGADFAWMIRKPGQEGEITPWNFDQKVDRMASANRFIRRMTTKDSYLVAEDVLPDASLIYEKFKALNELNMLKVNDSRLSPSQKQDLFNNLFKKQKTIRTKKLQTYIRTNWELPSVMISGLADPDKFNSSLSTYIDFRDIFGEKVDDPNRQADYEEIIEWSTVFEDRKIYQAKLNQLDWLTEPQRKALLTKRYTGWGRLSKKLLTGLKDQNGDSILDQLWKTNDNFMQIQSRDEFAKQIHDENAKQFHEANNVDDILDDAFTSPQNKKAIRQVDKVVQDVVKAVGYAPDKIAIEFTRSLENNPQRTVSRQRQLQAAYKNIPREIMKSGLMAELGSVADSKKVLSDKLYLYFTQMGKDMYEDKTINIDNLPNYDIDHILPQAFIKDDSIDNRVLISKEENARKSNRVPLKFFGAKRMGFWKDLLNNGLISNRKFQNLTTDPEKISKYSAKGFIHRQLVETSQVIRLVANILGNEYSQAGTTIIEVSAKMNRQLREDFHLIKNRNVNDYHHAMDAYLTAYVGDYLYLRYPKLRPYFVYGDFKKAEDQDLNIRNFNFLHDLKDNESLDKIVDSETGEIVWEKHGSVKQLKKVYHYKFMLVSQEVYTRQDALFNQTIYPASDADKRKLIPIKNSKPVDVYGGYSGNIDAYMAIVRVHGKKEDNYKVVGIPMRAVTKLKKAEKEGHDSYLNAVHEVLKPQFTKKKKNRKTGEITETVDEFDVLLGKVYYRQLIVDGNKKFMLGSSSYQYNAKQLVLSDKAMQVLSKNGKVKSQDENQNLIDVYDEILEKVDQYFELYDQRHYRESLHKGRGIFVNLPLSNQYDGSKLTSYGKYETIDAILNGLHANATMSNLRYLGISSPFGKMQASNGLTIDPDSIICYQSPTGLFERQIKLSDL

SEQ ID NO: 91 - protein, 1239 aa, Lactobacillus buchneri
MTEKRKFDIREVYLAIHHIVKYRGNFLNSATVDSFKTSNIDFTSQFDRLNELYRQVILEEPFQINMNQVDKMTNKLLDNDALKLDTQKQVAKLLPVIYNDKPVDKQYTRLATEFSKAILGYKTKLDVILNLDTQNAKDWAIRLDDEDIDDKLPALVENLDESRQEIVTIIRDLYAQITLNAIVPKGKSLSESMVDKYNDHKDHLDLLMGLIHELGDDSAKGIKLREAYTQYVGKSGDKTLNQDDFYAAIKKNLDEDSKRSPKIQRLIEQASFMPKQRTSANGVIPHQLHQLELDRIIENQGRYYPFLKEPNSNTHKPNGGKYKLDELVAFRIPYYVGPLITKQDQEKTSGADFAWMIRKPGQGGEITPWNFDQEVDRMASANTFIRRMTTKDSYLVAEDVLPDSSLIYEKFKVLNELNMLKVNDRRLSISQKQDLFNNLFKKQKTIRTKKLQTYIRTKWELPSVMISGLSDPDKFNSSLATYIDFRDVFGEKVDDPNRQADYEKIIEWSTVFEDRKIYQAKLNQLDWLTESQSKALLTKHYTGWGRLSKKLLTGLKDQNGDSILDQLWKTNDNFMQIQSRDEFAKQIHDENAKQFHEANNVDDILDDAFTSPQNKKAIRQVDKVVQDVVKAVGYAPDKIAIEFTRSPQDRPQRTFSRQRQLQSTYLNVAKALMKSNLNQELKSVIDSQQTLTDKLYLYFTQLGQDMYTGKEINFDELVNYQIDHILPQAFIKDDSLDNRVLVSAPINNAKSDNVPVKKFGAKMGYFWKQLAENHLISKRKLNNLTTDPDKIGKFTAQGFIHRQLVETSQVIRLVANILGNEYGHDGTTIIEVTAKMNHQMRKDFDLIKIRDVNDYHHAMDAYLTAYVGDYLYLRYPKLRSYFVYGDFKKLKDQSLKIRNFNFLHDLTNDEAGDKIVDQETGEIIWDKHESVKQLKKVYHYKFMLVSQEVYTRQDALFNQTIYPASDADKRKLIPIKNNKPVDVYGGYSGNVDAYMAIVRIHGKKEDKYKVVGVPMRAVADLKKAESKGRDNYLNAVHEVLKPQFTKKKKDRKTGEITEMMDDFDVLLGKVYYRQLIVDGNKKFMLGSSTYQYNAKQLVLSDKAMQVLSKDDKLKNQDENQNLIDVYDEILEKVDQYFELYDINKFRQKLHDGRKKFIELPVDNDFNGKKLISYGKRATIISILNGLHANATMSNLKYLGISSPFGMLQVPNGIILSPASRICYQSPTGLFERKVKLSDL

SEQ ID NO: 92 - protein, 1381 aa, Lactobacillus fermentum
MDYVKEYHIGLDIGTSSIGWAVTDSQFKLMRIKGKTAIGVRLFEEGKTAAERRTFRTTRRRLKRRKWRLHYLDKIFAPHLQEVDENFLRRLKQSNIHPEDPAKNQAFIGKLLFPDLLKKNERGYPTLIKMRDELPVEQRAHYPVTNIYKLREAMINEDRQFDLREVYLAVHHIVKYRGHFLNNASVDKFKVGRIDFDKSFNVLNEAYEELQNGEGSFTIEPSKVEKIGQLLLDTKMRKLDRQKAVAKLLEVKVADKEETKRNKQIATAMSKLVLGYKADFATVAMANGNEWKIDLSSETSEDEIEKFREELSDAQNDILTEITSLFSQIMLNAIVPNGMSISESMMDRYWTHERQLAEVKEYLATQPASARKEFDQVYNKYIGQVPKEKGFDLEKGLKKILSKKENWKEIDELLKAGDFLPKQRTSANGVIPHQMHQQELDRIIEKQAKYYPWLATENPATGERDRHQAKYELDQLVSFRIPYYVGPLVTPEVQKATSGAKFAWAKRKEDGEITPWNLWDKIDRAESAEAFIKRMTVKDTYLLNEDVLPANSLLYQKYNVLNELNNVRVNGRRLSVGIKQDIYTELFKKKKTVKAGDVASLVMAKTRGVNKPSVEGLSDPKKFNSNLATYLDLKSIMGDKVDDNRYQMDLENIIEWRSVFEDGEIFADKLTEVEWLTDEQRSALVKKRYKGWGRLSKKLLTGIVDENGQRIIDLMWNTDQNFMQIVNQPVFKEQIDQLNQKAITNDGMTLRERVESVLDDAYTSPQNKKAIWQVVRVVEDIVKAVGNAPKSISIEFARNEGNKGEITRSRRTQLQKLFEDQAHELVKDTSLTEELEKAPDLSDRYYFYFTQGGKDMYTGDPINFDEISTKYDIDHILPQSFVKDDSLDNRVLVSRAENNKKSDRVPAKLYAAKMKPYWNQLLKQGLITQRKFENLTMDVDQNIKYRSLGFVKRQLVETRQVIKLTANILGSMYQEAGTDIIETRAGLTKQLREEFDLPKVREVNDYHHAVDAYLTTFAGQYLNRRYPKLRSFFVYGEYMKFKHGSDLKLRNFNFFHELMEGDKSQGKVVDQQTGELITTRDEVAKSFDRLLNMKYMLVSKEVHDRSDQLYGATIVTAKESGKLTSPIEIKKNRPVDLYGAYTNGTSAFMTIIKFTGNKPKYKVIGVPTTSAVGLKRVGKPGSESYNQELHRIIKSNPKVKKDFEIVVPHVSYSQLIVDGDCKFTLASDTYQHPATQLVLSKESMEIIADDFKFVKENPATADEQLVRVFDEIVNQMNHYFTIFDQRSNRQKVTKARDKFVSLPTESEYEGAKKTQVGKTEVITNLLMGLHANAAQGDLKVLGLSTFGFFQSSGGLNLSEDAMIVYQSPTGLFERRICLKDI

SEQ ID NO: 93 - protein, 1306 aa, Sphingobacterium spiritivorum
MKHILGLDLGTNSIGWALIKQNFENKQGEILGMGSRIIPMGAELSKFEQGQAQTKNANRRIARGTRKLNKRYKQRRNKLIYILQGLGMLPDQIKLVNQFSDPNKLDKISILPISKNQQQLTAFDLLELRVKALTEKIELEELGKVIYKYNQLRGYSGGNSEPEKEENNEDESEENEKTNDSFVVFSKVLSLGLPEEITFKGKKLSKRKIAIETEDGIIEAETFLDSLKENDSLELHVNIRRAKSGDTITIKLPSKTSWRKKMENIEKQLADKSKELGREYFISELLFDILKENKWAKIRNNVILRSRYESEFDAVWSEQSKYYPILNHLETDRLQKILEFIFPGQKESQEKLRQTGLKEGLKYVIKNQVVFYQRELKDQSDLISNCRYEPTEKVVAKSHPVFQEYKIWEQINKLVINTKIENGVNRKGEIRYKYIDKPIPVALKEWLYEELQSKKEVSFNPILTKLKKEFKLRENVDFLNGMNAKDKLKGNETKVILQKALGELWNIFGLDDSERQVELWEILYNGKGNEYDLTSERTSNILAFIEKYSPDLENKNDVAIKISKIKFSRNYSNLSLKAIDNILPLVRAGKFFDQNFSEALSHKIVKLLNENVEDPFEKSAQEFLDKNQDVLSDGGIVNAIATILVYDKHTAKEYSGDELIKEFTQISRLKQGELRNPLAEQIINEALVIVRDIWRKYGFKPDEIRVELARELKNNAVERGKMYSANLKSQKHNAEIRNKLIELKQEISIANIEKYKLWVSQENLQEVYLKNYNDPSKSEIEKLKLWESQGHISPYTGQPISLSELFNRERYDVDHIIPQSRYFDDSLSNKVICEKSINNEKGNRTSMEYFEVGSVNYRIFTKDQFIDHANKYFSGKKRKNLLATSIPEDPIQRQIKDTQYISIRIREELNKIVGNENVKTTTGGITDYLRNHWGLTDKFKVLLKERYEAVLPKIAQLEYDNYKKETEKKFTEYKNADVEFNEPILDEEIFIEKFRSEFIRKKNNKLIIKGWSKRIDHRHHAMDALVIACTQPAHIKRLNDLNQVLKEWLDKNKEKFFPGFSGTKTELLDEVLNLEEEKRREIFNQLEKFRAIEMPWKGFPEEAEQKLKEVIVSHKPKDKLLLQYDIQGNKQIKLRGQLHEGTLYGLSNGKEIYRIPINKLAGKQFATEKTIEKIVNPFLKNVIEEHLKSFGKKEEAFSAEGILDLNKKLAERKDEQQNPKPHPPISTIKIYYKDPSKSKKKKTDDEDDISLQKLNRKKSFNDSLYVKTGDNYLFAVMEKEVFNKKLNKDKTERHYDLKLFLTLLIF

SEQ ID NO: 94 - protein, 1358 aa, Acidaminococcus sp.
MGKMYYLGLDIGTNSVGYAVTDPSYHLLKFKGEPMWGAHVFAAGNQSAERRSFRTSRRRLDRRQQRVKLVQEIFAPVISPIDPRFFIRLHESALWRDDVAETDKHIFFNDPTYTDKEYYSDYPTIHHLIVDLMESSEKHDPRLVYLAVAWLVAHRGHFLNEVDKDNIGDVLSFDAFYPEFLAFLSDNGVSPWVCESKALQATLLSRNSVNDKYKALKSLIFGSQKPEDNFDANISEDGLIQLLAGKKVKVNKLFPQESNDASFTLNDKEDAIEEILGTLTPDECEWIAHIRRLFDWAIMKHALKDGRTISESKVKLYEQHHHDLTQLKYFVKTYLAKEYDDIFRNVDSETTKNYVAYSYHVKEVKGTLPKNKATQEEFCKYVLGKVKNIECSEADKVDFDEMIQRLTDNSFMPKQVSGENRVIPYQLYYYELKTILNKAASYLPFLTQCGKDAISNQDKLLSIMTFRIPYFVGPLRKDNSEHAWLERKAGKIYPWNFNDKVDLDKSEEAFIRRMTNTCTYYPGEDVLPLDSLIYEKFMILNEINNIRIDGYPISVDVKQQVFGLFEKKRRVTVKDIQNLLLSLGALDKHGKLTGIDTTIHSNYNTYHHFKSLMERGVLTRDDVERIVERMTYSDDTKRVRLWLNNNYGTLTADDVKHISRLRKHDFGRLSKMFLTGLKGVHKETGERASILDFMWNTNDNLMQLLSECYTFSDEITKLQEAYYAKAQLSLNDFLDSMYISNAVKRPIYRTLAVVNDIRKACGTAPKRIFIEMARDGESKKKRSVTRREQIKNLYRSIRKDFQQEVDFLEKILENKSDGQLQSDALYLYFAQLGRDMYTGDPIKLEHIKDQSFYNIDHIYPQSMVKDDSLDNKVLVQSEINGEKSSRYPLDAAIRNKMKPLWDAYYNHGLISLKKYQRLTRSTPFTDDEKWDFINRQLVETRQSTKALAILLKRKFPDTEIVYSKAGLSSDFRHEFGLVKSRNINDLHHAKDAFLAIVTGNVYHERFNRRWFMVNQPYSVKTKTLFTHSIKNGNFVAWNGEEDLGRIVKMLKQNKNTIHFTRFSFDRKEGLFDIQPLKASTGLVPRKAGLDVVKYGGYDKSTAAYYLLVRFTLEDKKTQHKLMMIPVEGLYKARIDHDKEFLTDYAQTTISEILQKDKQKVINIMFPMGTRHIKLNSMISIDGFYLSIGGKSSKGKSVLCHAMVPLIVPHKIECYIKAMESFARKFKENNKLRIVEKFDKITVEDNLNLYELFLQKLQHNPYNKFFSTQFDVLTNGRSTFTKLSPEEQVQTLLNILSIFKTCRSSGCDLKSINGSAQAARIMISADLTGLSKKYSDIRLVEQSASGLFVSKSQNLLEYL

SEQ ID NO: 95 - protein, 653 aa, Oribacterium sinus
MELINSEEFTFKEELEKHTQVAMKQLSEFTYEDLEDSYFSVPVKRMIWQTLLVVREIEKVMGYAPKRIFVEMTRTEEEKGDKGRKESRGNQLLELYKSIKNTDSHNWKEEIAAADKDGKLRSKKLFLYYMQMGRDMYTGEEIDLGRLYDDNLYDIDHIYPRHYVKDDSIMNNLVLVNRRANQDIKKDLYPIPEQIKANPNVHMLWDALHKQKLITDEKYARLTSNTAFSEKQLGDFIARQLVETGQGTKGVADLLEQLFKDTVIVYAKASNVSDFRRDNGFLKSRLVNDFHHAQDAYLNIVVGNVYYTKFTKNPWNFICKDYEKDKEKNRYNLARMFDWNVVRGSETAWIVERKDEKGTISTVRKMMQKNTPLLTRMNFEQHGSIANATLYSAKKAKSENYLPLKTADEKMSDVKKYGGYTSMSIAYYFIVHHKEDKKENVTIEALPLYCKDKVEREENGLEKYCEEVLGYGEVNIIRRKLKIQSLLEFNGYQVHLSGKTGNQLILRNAISLCLSTKWITYIKKLEKAVNIQIVEEVVTPEENIKLYNLLADKHANTVYSKRPNAYGEKLLADREIFVTLEFGKQCEALLQILSLTKIGSTEANLLLIGESEHSGKILISKNLKASDRPAVINQSPCGLYEKKEWIFDKIVEK

SEQ ID NO: 96 - protein, 1436 aa, Capnocytophaga gingivalis
MKYIKYILGLDIGSNSIGWALIQLDLLQKTKRIIAAGSRIIPMDQKVLSDFGKGITISPTAQRTSYRNARHCRERHLLRRERLHRVLHILGFLPTHYDKQIDFSKRYGKFVDNTEPKIAYNEGKFLFMDSFQEMLSDFKSHQPDLFYTKKNGEESKIPYDWTIYYLRKKALSQKISKEELAWIILNFNQKRGYYQLREEEGNKENDFEIISSKIISVIKKDKDKKYNKYWYDIILENGLVYQAAFYNDFVYNWINQDREFIIERTSLKNGAEKVKLSYLPTFDEIDKMDKKEQDKYYKKIKIKTENSIGNKTVGCYIYDHILQNPNEKIKGKLVRTIERKYYKEELKAILEKQIALQPELFTDQLLADCIRELYSKNEAQQRNLAARDFVHLLVEDIIFYQRPLRRQKSTLANCSLESRSYIDKDSHTRKEAPLKVCPKSNPYYQEFRVLQWLQNLKIYEIDSDQEVTHQFIKTLEDKQQLFEFLMAQKEIDCEELLKYFLNQTYPNAKEKALKSELKKWKDTYRWNYVYDIGEKSSKKYPMNETRYELKRHLEKVANLPDDFLSSEVEYLLWHLIYSVKDKVAYEKGLKKFAQKHHLDKDSFVESFKKFNPYPSEYGSFSEKAIRKLLPLMRFGAHWDFNHIDKNTQKRIEDLITGVENEEIRTILREKAEKYQLEKETDFQDLPLWLAQYIVYNRHAEASSLEKWTSVNDLETYLNEFKQHSLRNPIVEQVVMETLRVVRDIWQQYGQGQASFFNEIHIELGRELKKTAKEREKLSKQNQKNEDINLSIKEKLKELEKYNTRAYSITHQEKYKLWLEQKHISPYTGQIISPENLFTDNYEIEHIIPQSRFFDDSLSNKVVCESIVNKAPYKDRQLGLEFIKNQGGRIVKELSKENKTIKIFTEEQYRTFIKEHYSNNPEKTKKLLLEEIPEKMVARQMNDTCYISKFISEILSKIVRSDEQDEGVHSKNVILCTGKITSILRQDWGLNDIWDNLILPRFERMNNLLQKEKFTIYSIEKQKKIPVVPINDQFKSFQKKRIDHRHHAMDAIIIACTTREHINYINNQHALEKEKDKKEKQEERDKLREKLCIKKYNNRSEGNYSWIFKKPWDTFTQEVRVALEDIVVSFKQNLRVINKATNYYERWVEENGKYIKKMVKQEGTNWAIRKPLHEETISGKIYLDREKITKNDILTATRKTVDSSFDDKRIKKITDTGIQKILLNYLKYKGSPEIAFSPEGLEELNKNLSIYNDGKPHKPIYKVRIYEKGSGRFALGEKGRKYKKYVQGASNLYFGIYQGAKRSFATIPLNEVIERQKQGLPSVPEYNEKGDLLLFSLSPNDLVYVPIEGEIIENIDFRNLSKEQKERIYNVNDFSSTCYFTPNRIAKAIFPKEVDLQRKGDKLSGSYDTKTASLEGIQIKEVCIKLKVDRLGNISKA

SEQ ID NO: 97 - protein, 1069 aa, Bacillus cereus
MNYDIGLRIGITSCGWSIINKDLERIEDLGVRVFEKAENPDGTASAAPRREARKSRRKHRRKKHRIERIKRLIVQHDLLSKKELDSLYLSPFNIDVWNLQVEALERKLDNREFARVLIHLVQRRGFQTIRKSVEIQEEGKLLENVSENERIMKVNGYKTVGEMFSKHEKFTHHKRNKDGSYTSVVTRSLLLKEIKTIFNSQRILGNVFSTQKLESDYLYIWGSQRPTLTYEQLMSMVGNCIYEKKEKRAPKTSWAFQYFSLLQKINKLKVSDDNTLRKLSKEERDIVIELAFKKKNVSFVDIRKALKLNDNTKFNHLTYSHVVETKKVEKATFIELKGYHLIKKQLKDRNVELTQELQPKDYDAIAAASTFFKNDIEFRDYLRNQYLDSNGKRKSNIANKVFEDKVIAAVFELNFSKVCHLSFKSLYKLIPHLEKGLDYKEAILCAGYNFRDENKRDKKLFLPVIQQETNPVVHRALTQARKVINAIIREYGSPNTIRFVVANDLAKTYKQRKELESTLKKNRAENEKIKTKLLSMGIINPTGMDIVKYKLWYEQSGICLYTGRQMELSSLFKPGYSIVNHIIPYNRSFDDTYHNRVLTLTETKYEKGNKIPFEYFGAEETCWNEYEKRVSTSKKIHDKKREKLLIRNFDIEYENEMISNNVFDTHYIGSYFEKYIDEHLQFKKSTKKQKVFSIHGNMVAHLHSRWGFNKNSREIYLNHAVDAAIVAVLTDQLIRNIADYYRRDNILEQKGSLKFPEPWKSFSIELEARISPQVRDLIKKLNLDSYLDVDILHIKPVFISKKPRRKVNGEAHKSTIRSLIGINEIGKTVTCIKTRLEDIPFDENGDFPMYGKDTDKYTYTAIKERYLEFNKDKEKAFSTPLYKLKRNGEPGNQIKSVKIIDTRNIVNKVNQGKGIAYNSNIIRVDVFSRDQKYYVVPIYLRDFIKGSLPNKIITAAKGFMQWPETDNSYTFLFSIFPNDLIKVVPKEGKFIKAKNENKENINLTEILGYFKGLDSSTGAFTLESHDGSLLARGIGTKNLLLIEKYQVDVLGRYNKVGNEERQDIKIQQN

SEQ ID NO: 98 - protein, 1391 aa, Lactobacillus jensenii
MKEIKDYIIGLDIGTNSCGYVVTDKQNNILKLKGKTAIGARLFKEGEAAADRRAFRTTRRRLARRRWRLSLLEEIFDEEMNKVDPSFFRRLKESDYSPKDRRKQFNSIVFESSEADKAFYEKYPTIYHLRNALMHDNQKHDLREIFLAVHHIVKYRGNFLREDSVKAFKAAKFTLQGEDGIGPVDKLNDLLKEIYIEAAPELATDNLSKIEDIIKDKKLYKQDKLKQIANLLPKAVDSKDKAKLNKDIAKQVANALMGYMFRLDTLFSFTDVDVKDYKLKFSDANIDESLDALTSLLTDAQIEFVLELQSIYNTIVLNEIVPDGMSLSESMVKKYDDHKKDLKLYKEYIDSLSDQKKAKQLEAAYALYVNYRKADLLAAKKLFEKKKIGDKKFVDVISNFEVFGKFVSDNLDDSELANKIKARLDLGEFLPKQRTNQNGVIPYQLHQVELTQILEKQGKYYPFLITPNPVESHRNNAPYEISELVSFRVPYYVGPLIDNQSIKDKQNKNKFAWMVRQKQGQITPWNFEEMVDTTESANQFIKRMTRKDTYLLAEDVLPKSSLIYQKFMILDELNRIKIDGKKLTSKLKHDIFEKLFKKQKSINLDNLKNYLLAEGNIPGLIEGLSDGINFNNSFSTYIDYRNIFGDEIDNPNKQADFEKMIEWSTVFEDRKIFKRKLKEITWLTPEQIKQVSSKRYSGWGRLSKKLLTQITDENGVNILQRLWNEPETLTEVLANPVIKRKISEANSLFVQINKVENILDDAYTSPQNKKAIRQVIRVVDDIIAAAHGKKPSQIAIEFARSSQNKAKVPDTRKKQLDKIYNKISSEILDSSIKNELKNLKSNKYLSKDKLFLYFKQMGRDAYTGDKLSLDQLQNYDIDHIFPRSFIKDDSLDNRVLTQKPINAKKSDYGIPALEFGNKYVPDLGITVKEMWKLWQENGLISKSKLINLCTNPKKIGSKRASGFINRQLVETSQVIKLVAIILQAEFPDTEIIEVKALQNTTLRESFHLYKNRSVNDYHHAIDAYLTTIVGNYLYQVYPKLRPYFVYGQFKKFNQEKNIDILKRLKNFNFLRQLIFNTDDNIYISGTKEIVFNKKDIIHKLETAYGYKYMNISRECYQETSSLFNQTLYAHNSSVKNSLIPKKKGLPTEIYGGYSGNKDSFFVLVKIVKKRTNLYRIVGIPTRELAKLNSSNNYNQALNKIVESKLCLKETESFKILIKRLLYGTLIVDNGQKFRIGSFKEKHNVQQLVLQLKSMKYIKFYIDGGQNYFTDVERKKLEKQDRDKCLLYVFDDIMNVVNKRFTLFDMSKYEKDGDSLREKFNCLDFNDKVSILSDLLKAFHANSDRTSITKLKITNLGRHQAGKNGITLTTNAQIIYQSPTGLFERRIKIKDL

SEQ ID NO: 99 - protein, 1114 aa, Eubacterium rectale
MNYTEKEKLFMKYILALDIGIASVGWAILDKESETVIEAGSNIFPEASAADNQLRRDMRGAKRNNRRLKTRINDFIKLWENNNLSIPQFKSTEIVGLKVRAITEEITLDELYLILYSYLKHRGISYLEDALDDTVSGSSAYANGLKLNAKELETHYPCEIQQERLNTIGKYRGQSQIINENGEVLDLSNVFTIGAYRKEIQRVFEIQKKYHPELTDEFCDGYMLIFNRKRKYYEGPGNEKSRTDYGRFTTKLDANGNYITEDNIFEKLIGKCSVYPDELRAAAASYTAQEYNVLNDLNNLTINGRKLEENEKHEIVERIKSSNTINMRKIISDCMGENIDDFAGARIDKSGKEIFHKFEVYNKMRKALLEIGIDISNYSREELDEIGYIMTINTDKEAMMEAFQKSWIDLSDDVKQCLINMRKTNGALFNKWQSFSLKIMNELIPEMYAQPKEQMTLLTEMGVTKGTQEEFAGLKYIPVDVVSEDIFNPVVRRSVRISFKILNAVLKKYKALDTIVIEMPRDRNSEEQKKRINDSQKLNEKEMEYIEKKLAVTYGIKLSPSDFSSQKQLSLKLKLWNEQDGICLYSGKTIDPNDIINNPQLFEIDHIIPRSISFDDARSNKVLVYRSENQKKGNQTPYYYLTHSHSEWSFEQYKATVMNLSKKKEYAISRKKIQNLLYSEDITKMDVLKGFINRNINDTSYASRLVLNTIQNFFMANEADTKVKVIKGSYTHQMRCNLKLDKNRDESYSHHAVDAMLIGYSELGYEAYHKLQGEFIDFETGEILRKDMWDENMSDEVYADYLYGKKWANIRNEVVKAEKNVKYWHYVMRKSNRGLCNQTIRGTREYDGKQYKINKLDIRTKEGIKVFAKLAFSKKDSDRERLLVYLNDRRTFDDLCKIYEDYSDAANPFVQYEKETGDIIRKYSKKHNGPRIDKLKYKDGEVGACIDISHKYGFEKGSKKVILESLVPYRMDVYYKEENHSYYLVGVKQSDIKFEKGRNVIDEEAYARILVNEKMIQPGQSRADLENLGFKFKLSFYKNDIIEYEKDGKIYTERLVSRTMPKQRNYIETKPIDKAKFEKQNLVGLGKTKFIKKYRYDILGNKYSCSEEKFTSFC

SEQ ID NO: 100 - protein, 1362 aa, Lactobacillus paracasei
MTKLGKPYGIGVDIGSNSIGFAAVDENSHLIRLKGKTVIGARLFEEGKAAAKRRAGRTTRRRLSRNRWRLSFLRDFFESHITPTDPNFFMRQKYSEISPKDKARYKYEKRLFNDRTDAEFYQQYSTMYHLRNRLMTDPSRADVREIYFAIHHILKSRGHFLTPGDAKDFNTNDVALDEIFPALQDAYAQVYPDLGITFDEDKANEFKTILLNEIATSIDTQRALVKLLLAEEDDKDILKQQKQVLTEFAKAVVGLKTKLNLALGTEVDSSEATAWNFSLGQLDDKWAGIESAMTDEGTEILDQIRDLYRARLLNGIVPTGKTLSQAKVDDYTQHHEDLQLFKAYLKQLEDDGTAKAIRQLYDRYIDGDDAAPFLRENFVKALTKDVTAHPNTKSPELLERLAQPDFMLKQRNKANGAIPVQMQQRELDQIIKNQAVYYDWLAAPNPVEKHRKSMPYQLDELLNFRIPYYVGPLVTAKEQKAAQGGVFAWMVRKDPEGNITPYNFDEKVDREASANTFIQRMKTTDTYLIGEDVLPKQSLLYQRYEVLNELNNVRVNNEKLSIEQKQQVIRELFERHNSVTIKQFAENLRAHGDYAHIPEIRGLADEKRFLSSLSTYRQLKSLLPEAIDDPAKQADIENIIAWSTVFEDAAIFKTKLKEISWLGSEAITKLSNIRYRGWGQFSRKFLNGLTLGNGHTIIQELLLSTNNLMQILTDETLQKKMTELNADKLKTANINDAIDNAYTSPSNKKALRQVLRVVDDIKRAADGQDPSWLYVETADGGGTPGKRTRARQHQLQEIYANAAHELIDTAVRGELEDKISDKADFNDRLVLYFMQGGRDIYTGAPLNIDQLSSYDIDHILPQSLIKDNSLDNRVLVHAIINREKNATFASTIYAQKMNATWRQWHEAGLISGRKLRNLQMRPDQIDKYASGFVARQLVETRQIIKLTEQIVAAQYPDTKIIAVKAGLSHQLREELEFPKNRDVNHYHHAFDAFLAARIGTYLLKRFPNLQAFFTYGKFTKADVKKLRGFNFIRDITHAEDKIVAKDTGEVVWDKQRDVDELDRIYNFKRMLITHEVRFETADLFKQTVYGARDSKEAGGSKQLIPKKKGYPVDIYGGYFRENTAYLAVVKVTKKTETIFKVVKIATSQVAALNKARSRSTAEELSVLTELLKPKFSKVGKNGKITDTPFEVVLPRVPREQLFYNAKYGFFMVNSDTMFHNFQEIWVSRSDQKILQQIRKAKIDYPNVDQDLDNLFHNLADQIVKYFDLYSIAGFKEKISQSQNTFNDLAVDDTDQSVGKITVINELLKGAQANGMTGSLKVLKISTPFGFTQDKSGVLTKDSSIIYQSPTGLFERSVRLTDL

SEQ ID NO: 101 - protein, 1056 aa, Actinobacillus minor
MKALNYILGLDLGIASVGWAVVEIDQNELPIRLIDLGVRTFERAEVPKTGDSLALARRLARSSRRLVRRRAVRLLKAKRLLKQEGILQADDFHSSHLKPLPNNPWELRVKGLNHLLDRKEWAAVLLHLLKHRGYLSQRKNESKTDNKELGALLKGVSENRQLLQAQAFSTPAEIAIKKFQQEEGHIRNQRGAYSHTFDRNDLLAELRLLFQKQREFNNPYTSQSLEQAIAELLMWQKPALSGEAILKMLGKCTFEPSEYKAPKNSYSAEYFVWLTKLNNLRILENGADRGLTAEERQLLINQPFEKAKFTYAQARKLLELSDLAIFKGVRYGKDNAESATLMEMKAWHAIRKALESNGLKTEWNGLKTKPELLDKIGTAFSIYKTDEDISQYLNGELSPAVLNALLENLSFDKFIRLSLQSLAKILPLMEQGLRYDEACKQVYGDHYGKKEQLELRFLPKIPVEDIRNPVVLRTLSQARKVINGVVRLYGSPARIHIETGREVGKSFSERRDISKRQEENRNERQRAVEKFKEFFPHFVGEPKAKDILKMRLYEQQHGKCLYSGKELDLNRLLEKGYVEIDHALPFSRTWDDSFNNKVLVLASENQNKGNQTPYEWLNGKENAERWKLFQALVNGSRFPYSKKQRILTKYLDEDGFRERNLNDTRYVARFLCNFIEDNMQLVGQGKKRVFASNGQITALLRRSWGIQKVREDNDRHHAVDAVVVACSTRALQKKITDYVRYKEMNVFTGEKIDQETGEIIKFHFPEPWKFFRQEVEIRVFSETPAEDVVIALPDRPQANHEFIQPLFVSRAPTRKMTGQGHMETIKSAKRLAEGLSVSRVPLTQLKLKDLENMVNREREKALYEALKVRLEKFNNDPAKAFADPFYKKGGQQVKAVRVEQVQKSGVLVRQENGVADNASMVRVDVFIKGGKYFLVPIYTWQVAKGILPNRAATQGKEEEYWDIMDETAIFQFSLYQNDLIKLVTKKKTIFGYFNGLNRATSNINIKEHDLDKSKGKDGIYLEVGVKLALSLEKYQVDELGKNIQPCRSMKKRPPVR

SEQ ID NO: 102 - protein, 1081 aa, Neisseria flavescens
MTAFKPNPINYILGLDIGIASVGWAMVEIDEEENPIRLIDLGVRVFERAEVPKTGDSLAAARRLARSVRRLTRRRAHRLLRARRLLKREGVLQAADFDENGLIKSLPNTPWQLRAAALDRKLTPLEWSAVLLHLIKHRGYLSQRKNEGETADKELGALLKGVADNAHALQTGDFRTPAELAVNKFEKESGHIRNQRGDYSHTFSRKDLQAELVLLFEKQKEFGNPHISDGLKEGIETLLMAQRPALSGDAVQKMLGYCTFEPTEPKAAKNTYTAERFIWLTKLNNLRILEQGSERPLTDTERATLIDMPYKNKLTYAKARELLGLDDTAFFKGLRYGKDNAESATLMEMKAYHAIRRALEKEGLKDKKSPLSLSPELQDEIGTAFSLFKTDEDITGRLKGCLQPEILDALLKHINFDKFVQISLKALRRIVPLMEQGKRYDEACAETYGDHYGEKNSEEMLYLPPIPADEIRNPVVLRALSQARKVINGVVRRYGSPARIHIETAREVGKSFKDRKEIEKRQEENRKDREKAAAKFREYFPNFVGEPKSKDILKLRLYEQQHGKCLYSGKAIDIRRLNGKGYVEIDHALPFSRTWDDSFNNKVLVLGSENQNKGNRTPYEYLNGKDNSREWLEFKARVETSRFPHSKKQRVLLQKFDEKGFKERNLNDTRYVNRFLCQFVADHMQLTGKGKRRVFASNGQITNLLRGFWGLHKVRAENDRHHALDAVVVACSTVAMQQKITCFVRYKEMNAFDGKTVDKETGEVLHQKTHFPQPWEFFAQEVMIRVFGKPDGKPEFEEADTPEKLRALLAEKLSSRPEAVHEYVTPLFVSRAPNRKMSGAHKDTLRSAKRFVKHNEKISVKRVWLTEIKLADLENMVNYKNGREIELYEALKARLGAYGGNAKQAFDPKDNPFYKKGGQLVKAVRVEKTQESGVLLNKKNAYTIADNGDMVRVDVFCKVDKKGKNQYFIVPIYAWQVAENILPDIDCKGYRIDDSYTFCFSLHKYDLIAFQKDEKSKVEFAYYINCDSSNGRFYLAWHDKGSKEQQFRISTQNLVLMQKYQIDELGKEIRPCRLKKRPPVR

SEQ ID NO: 103 - protein, 1392 aa, Gemella haemolysans
MANKTWYLGLDIGSASVGWAATDTGYKIIRKNKKRLWGVRLFEEAKTAEDRRGYRSSRRRLARRKWRLNLLEELFTSEVKKVDENFFLRLKESQYHYEDKTHKVPYAIFNDKDYTDKDYYKDYPTIYHLRSKLMTEENPDIRKVFLAIHHIIKNRGHFLLQGQSFKDGNLNNLIKELLELDILHVGFEVTEEVVDKIADISLEKKTSKDKLNDIKELYPKEKQLLEVFRLIFGGKTSLDKLFAIDEYKELDAAIKSVSFKEKIYEEVRHDYEQVLSNYIELLDLAKLVYDSIILSDIKKEGKTLSESKVELFEKHRDDLLKLKNLVKNDSKLSEDKKVELYALIFKEDKDKGTNYVNYIRKSEEGKGCNYEDFKKFLVKELAKLEESSVKTEIIKDLELEQFLPLQRTKDNSVVPYQIHKEELVKILDNAARYHSFLNEKDESGYNVREKVIQLLEFRIPYYVGPLNSSKKAKEGGFAWSVRNTGYENTPVTPWNYSKVIDESASAEKFITNLTNKCTYLKGEDVLPKSSLLYSEFALLNELNALKYDGNRISLEARNTIIEKLFKQQGKKVTKTSIKNLLKAEGYIDGKGEITGIDITVKNDLKSYRDFKKILGNKFNSEHVENIILWITLYGESRKLIKAKIESVYGEVYSKDEITKMSRLVYKDWGRFSRKLLTELVSKKLYNEETGECLNIIGAMRQNNILFMELLADRFDYSKQIVEFNKELQEDVTEIAPEILDDLYVSPAVKRSIWQTVRIVEELKKIIGCAPAKIFVETTRSNQEKKKPTDSRKKQLELAYKAVKKDVKELEKEIGTINFDVLNDRLSSVEPSKLKAKKLYLYYTQLGRCMYSEEPINISELFDNNKYDIDHIYPQSKIKDDSFTNTVLVKRESNAAKTDRYPLGSDIQTPSNRRFWKFLKEKGLISDEKYNRLVRTEEFSDEELSGFIARQLVETSQSVKAVASILGELNPETSICYSKAENVSSFRQNFGKIKKGDRDSKNNDQLIKVREINDYHHAKDAYLNVVVGNVYDTKFTRNVFNFIKDKKDGRKYSLNKVFYENVSDSKTVAWEMDKTIHQVEKVMNNNNIMVTRRTSEQKGGLFDATVYKAKVAAKAKDGVYYPLKTSNSVVKDVAKYGGYTSIGIAYYSIFEYTIVNKKGEEKITRIIPIPIYISQNIKDSTALIEFGKSQIFCRAYEKIKDFKLLYRKLCIGSKININNYQYYIGGKSDERFYYDSAIQVTLDKKSEKYLKILSKYQNWKKENKDGELWENITKENNIELYNKLVEKMNSEIFTKKKSNKYNELNSEEIRNNFIKISVEEQAKVLLEILNLLTNKKSIFDLKSIDIKAARGKISFNLTSLIQFSIIEQSITGFYEKEITIIGDKGNDMENNNS

SEQ ID NO: 104 - protein, 702 aa, Helicobacter pullorum
MRKILKIDERIQFKEVDYTAKNPENKKFVEFKNLKKFCEILGAIVGDRALADSIARDMTLIKDEEELAQKLRGYGKFSQEQITQLSALHFSHHISLSLKALSEILPFMREGMRYDEACQEAKLQAKHNDKKSKFLPPFCESIYADELTNPVVHRAIAEYRKILNALIAKYGSVHKIHIELTRDVGKNFQEREKYKKEIESNYKARVQAMQECEKLGLTLSEGNILKLRLFREQNEICVYSGRKITLANLKEQGALEIDHILPYSRSSDDSYMNKVLVFTNENQNKGNKTPYEAFGGDSQKWGEIESLALRSGYPKKKAKRILDKGFGDREAGFKSRNIVDSGYIARLIANYTKEYLKFLPLDSHENTALIAGEKDSKIHVEAVKGMLTATMRHFWGLGSKNRYEHTHHAVDAIIIAYINAAMIQRFSQFRQNQESLKARFYAKELAKEEFKTQRAFFEPFSGFREQVLAKVGQIFVSRPPRKRARGALHEETFYSIDDKKLSETYGGKKGVQRALSLGKIRQIGTKIVANGPMVRVDIFKHTQSGRFYAVPIYTMDFALGILPNKAVVSGKDKDRIIKDWLEMDSCYEFCFSLFKDDVIEVQKRDMEKPELAYFVSLDASDGRIKVRHHCNDITKINENQKKLFSEAIEKEVVGRGSIQNLKVFKKYKVSPLGEIKEAKYEPRQPIALKTSPKKHRKQNNAQ

SEQ ID NO: 105 - protein, 1371 aa, Streptococcus dysgalactiae
MDKKYSIGLDIGTNSVGWAVITDDYKVPSKKFKVLGNTDRHSIKKNLIGALLFDSGETAEATRLKRTARRRYTRRKNRIRYLQEIFSSEMSKVDDSFFHRLEESFLVEEDKKHERHPIFGNIVDEVAYHEKYPTIYHLRKKLADSTDKADLRLIYLALAHMIKFRGHFLIEGDLNPDNSDMDKLFIQLVQTYNQLFEENPINASRVDAKAILSARLSKSRRLENLIAQLPGEKRNGLFGNLIALSLGLTPNFKSNFDLAEDAKLQLSKDTYDDDLDNLLAQIGDQYADLFLAAKNLSDAILLSDILRVNSEITKAPLSASMIKRYDEHHQDLTLLKALVRQQLPEKYKEIFFDQSKNGYAGYIDGGASQEEFYKFIKPILEKMDGTEELLAKLNREDLLRKQRTFDNGSIPHQIHLGELHAILRRQEDFYPFLKDNREKIEKILTFRIPYYVGPLARGNSRFAWMTRKSEETITPWNFEEVVDKGASAQSFIERMTNFDKNLPNEKVLPKHSLLYEYFTVYNELTKVKYVTEGMRKPEFLSGKQKEAIVDLLFKTNRKVTVKQLKEDYFKKIECFDSVEISGVEDRFNASLGTYHDLLKIIKDKDFLDNEENEDILEDIVLTLTLFEDKEMIEERLKKYANLFDDKVMKQLKRRHYTGWGRLSRKLINGIRDKQSGKTILDFLKSDGFANRNFMQLINDDSLTFKEAIQKAQVSGQGHSLHEQIANLAGSPAIKKGILQSVKVVDELVKVMGHKPENIVIEMARENQTTQKGQKNSRERMKRIEEGIKELGSQILKEHPVENTQLQNEKLYLYYLQNGRDMYVDQELDINRLSDYDVDHIVPQSFIKDDSIDNKILTRSDKNRGKSDNVPSEEVVKKMKNYWRQLLNAKLITQRKFDNLTKAERGGLSELDKAGFIKRQLVETRQITKHVAQILDSRMNTKYDENDKLIREVKVITLKSKLVSDFRKDFQFYKVREINNYHHAHDAYLNAVVGTALIKKYTKLESEFVYGDYKVYDVRKMIAKSEQEIGKATAKRFFYSNIMNFFKTEITLANGEIRKRPLIETNEETGEIVWDKGRDFATVRKVLSMPQVNIVKKTEVQTGALTNESIYARGSFDKLISRKHRFESSKYGGFGSPTVTYSVLVVAKSKVQDGKVKKIKTGKELIGMTLLDKLVFEKNPLKFIEDKGYGNVQIDKCIKLPKYSLFEFENGTRRMLASVMANNNSRGDLQKANEMFLPAKLVTLLYHAHKIESSKELEHEAYILDHYNDLYQLLSYIERFASLYVDVEKNISKVKELFSNIESYSISEICSSVINLLTLTASGAPADFKFLGTTIPRKRYGSPQSILSSTLIHQSITGLYETRIDLSQLGGD

SEQ ID NO: 106 - protein, 1007 aa, Helicobacter canadensis
MKVLGFDIGINSIGWAFVENNELKDCGVRLFTKAENPKTKESLALPRRNARSSRVRLRRRRSRLLSLKHIISKEFGLHYEDYIALDGNLPKAYTGKIESIYKLRYEALSQAISKEDLARVILHIAKHRGYMNKNQKTSQDSEKGAILSAIKENSNKIKHYQTAGEYFYKELFENLRDGTKEFKNIRNKAMKNEKTGNMESTYYNTILASDLEKELKLILEKQQAYHNYSDTFIKEVLEIAFYQRPLKDFSHLVGSCTFYENEKRACKNSYSAWEFIALGKIINTLESIKKDTGEIFSNEIITQILKEVLDKGSLSYTKLRKMINLDEKVKFKGLKYDKEGVEKTNLIEFKKLKEFKKALGEHNLERKTLDEIATHITLTKDENQLKKQLEQYALSQNQIDALAELDFNDHINLSFKALYEILPLMEKGKRYDEACNELGLKAKTSNQKSEFLPAFCDSIFAQELTNPIVNRAISEYRKVLNRLLKKYGKMHKIHIELARDAGLSKEARNKIEKEQKENKDINDKAEKTCKEFGLKPNAKNILKIKLWREQGEICAYSGKKITIDDLKEDKALEVDHIYPYSRSYDDSYNNKVLVFIKENQLKLNQTPYEAFGSNQEKWSKIQVLAQKLPYKKKNRILDENFKNKDQIEFISRNLNDTRYATSLIAKYTKEYLEFLPLSDDEDISLKSGEKGSKTHVQTMNGMLTSVLRHAWGFSQKDRNNHLHHALDAIIIAYSTNSIIKAFSDFKKNQEILKAKLYAKKLTSEEYKNQSKFTGFEKYRSKILEKLDSIFVSKPPNKNTKGALHEQTFYSYQDILEEYKTQEGLKRALECGKVRKIGTKYVVNDRMVRLDIFKKDNKFYGIPIYTMDFALGVLPNKVVTIGTDKDKIKKEWKTIDETYEFCFSLYKGDLVLIQKKEMQESEFAYYNGFDISSASISLEKHDNKFENLTENQKLLFPKAKEGDVEVRGIGIQGLKVFKKYMVTPLGEIQETRTEARQNIQPRKKHGLR

SEQ ID NO: 107 - protein, 1397 aa, gamma proteobacterium
MTKNYISPIAIDLGAKFTGVALYQYLEGADCTQEVAKGLLVDDRGNVTWSQEGRRGKRHQVRGYKRRKMAKRLLWLILDSEYGIKREEVTEPLLKFINGLLNRRGYTYISEEVDEESMNVSPLPFSEMMPDYFNSSAPLLEQLAKLLSDKNKLVRFRAEGKIPSNKNEFKKLLDTALDGKYKDEKKELSEAWGNILIASENVLKSTVDGHKSRSEYLANIKEDIKSNEELEKQISSKEIDGFYNLVGHLSNFQLRLLRKYFNDPNMSGVSYWDEKRLEKYFYQWVQGWHTKGGTDEAEKKNIILKTKGAPLLKTLKSLSADLTIPPYEDQNNRRPPKCQSVLLSDEKLTMHYPKWKEWVGQLVKQNDNAYLNENVTLANALHRIVERSRSIDPYQLRLLISITDAEKRNDLAGYKRLKLSLGSEVDEFLLLVKNIVDETKEAREGLWFETENKLFFKCGKTPPRKEKLKSTLLSAVLGKNLSDDEQSSFIEEFWKSGTPKIERRNVRGWCRLASQVQKTYGVYLKEYGLQQLHKLEAGKKLDDKPLALLYKNSGLIASKIGEALNIEPDEVSRFASPHSLAQIFNIIEGDVAGFNKTCRACTYENIWRMQEEKVESLLTNQLLSEIHGERKVPLKSAMCTRLSADSTRPFDGQMASIIEHIARKIAQHKIAQINDVPKEFSIDIPIIIESNQFSFTAELEEIKRGRGSAKAKKAKELGEKSKAGWVSKTERIKTSSEGICPYTGAPLGGSGEIDHIIPRSLTGRTKKTVFNSEANLIYCSSKGNHDKGNRVYVIEQLNDKYLKKQFSTSDVNLIKKKIKTTIQRFTEGGEKLRSFSELSREDQKAFRHALFVPELKSEVTSLLAVKNITRVNGTQAWLAKKIASLLAEHLDKQGRDYTLSAHQIDPWSVSKQRKMLASAEPIWAKKDPQPAASHVVDAVCTFLEALEQPHTASRLKTISSTSFEKTGWRSALIPDLIKVDALDRRPKYRRYNIGSTSLFKDGIYAERFLPILIDENGLMAGYDIDNSLKAKGADVVFESLSPFLLFKGEEVGAQSLSDWQERIDGRYLYMSIDKVKAFDYLQEKVGEKDIAAELLNSIHFTQRKTELRAKFSDDSGKKMKTLDAIRKSLKLTVTVNEIGKRKEKCGFSGTIGIPAKSAWENLLDEPLLETYWGTKMPPQEIWEKVYRKHFPRNIPNQAHRKVRKDFSLPVVDSVSGGFRVKRKTPNGYNYQLLAIDGYSAVGFKKEGDNVDFKSPALVPQIAESKSVTPISSELVHLDKNEIVYFDEWRKIDISDSDLKQFVSSLELAPGSQNRFYIRFTVDEDQFERHFKSALRVNGIQDLDTVNKTFDWNREIPSLLIPPRSNLFLLETGQKITFEYIANGANAEVKKAYSLRRA

SEQ ID NO: 108 - protein, 1082 aa, Neisseria meningitidis
MAAFKPNPINYILGLDIGIASVGWAMVEIDEEENPIRLIDLGVRVFERAEVPKTGDSLAMVRRLARSVRRLTRRRAHRLLRARRLLKREGVLQAADFDENGLIKSLPNTPWQLRAAALDRKLTPLEWSAVLLHLIKHRGYLSQRKNEGETADKELGALLKGVADNAHALQTGDFRTPAELALNKFEKESGHIRNQRGDYSHTFSRKDLQAELILLFEKQKEFGNPHISGGLKEGIETLLMTQRPALSGDAVQKMLGHCTFEPAEPKAAKNTYTAERFIWLTKLNNLRILEQGSERPLTDTERATLMDEPYRKSKLTYAQARKLLGLEDTAFFKGLRYGKDNAEASTLMEMKAYHAISRALEKEGLKDKKSPLNLSPELQDEIGTAFSLFKTDEDITGRLKDRIQPEILEALLKHISFDKFVQISLKALRRIVPLMEQGKRYDEACAEIYGDHYGKKNTEEKIYLPPIPADEIRNPVVLRALSQARKVINGVVRRYGSPARIHIETAREVGKSFKDRKEIEKRQEENRKDREKAAAKFREYFPNFVGEPKSKDILKLRLYEQQHGKCLYSGKEINLGRLNEKGYVEIDHALPFSRTWDDSFNNKVLVLGSENQNKGNQTPYEYFNGKDNSREWQEFKARVETSRFPRSKKQRILLQKFDEDGFKERNLNDTRYVNRFLCQFVADRMRLTGKGKKRVFASNGQITNLLRGFWGLRKVRAENDRHHALDAVVVACSTVAMQQKITRFVRYKEMNAFDGKTIDKETGEVLHQKTHFPQPWEFFAQEVMIRVFGKPDGKPEFEEADTPEKLRTLLAEKLSSRPEAVHEYVTPLFVSRAPNRKMSGQGHMETVKSAKRLDEGVSVLRVPLTQLKLKDLEKMVNREREPKLYEALKARLEAHKDDPAKAFAEPFYKYDKAGNRTQQVKAVRVEQVQKTGVWVRNHNGIADNATMVRVDVFEKGDKYYLVPIYSWQVAKGILPDRAVVQGKDEEDWQLIDDSFNFKFSLHPNDLVEVITKKARMFGYFASCHRGTGNINIRIHDLDHKIGKNGILEGIGVKTALSFQKYQIDELGKEIRPCRLKKRPPVR

SEQ ID NO: 109 - protein, 1334 aa, Listeria monocytogenes
MKKPYTIGLDIGTNSVGWAVLTDQYDLVKRKMKISGDSEKKQIKKNFWGVRLFEKGETAAKRRMSRTARRRIERRRNRISYLQEIFAIQMNEVDDNFFNRLKESFYAESDKKYNRHPFFGTVEEEVAYYKDFPTIYHLRKELIDSQKKADLRLVYLALAHIIKYRGHFLIEGALDTKNTSIDEMFKQFLQIYNQVFANDIEEASLKKTEKNQEVAQILAEKFTRKDKLDKILSLYPGEKTTGVFAQFVNIIVGSTGKFKKHFNLHEKKDINCAEDTYDTDLESLLAIIGDEFAEVFVAAKNAYNAVVLSNIITVTDSTTRAKLSASLIERFENHKEDLKKMKRFVRTYLPEKYDEIFDDTEKHGYAGYISGKTKQADFYKYMKATLEKIEGADYFIAKIEEENFLRKQRTFDNGVIPHQLHLEELEAILHQQAKYYPFLREDYEKIKSLVTFRIPYFVGPLAKGQSEFAWLTRKADGEIRPWNIEEKVDFGKSAVDFIEKMTNKDTYLPKENVLPKHSLCYQKYMVYNELTKVRYIDDQGKTNYFSGQEKQQIFNDLFKQKRKVKKKDLELFLRNINQIESPTIEGLEDSFNASYATYHDLLKVGMKQEILDNPLNTEMLEDIVKILTVFEDKRMIKEQLQQFSDVLDGTVLKKLERRHYTGWGRLSAKLLVGIRDKQSHLTILDYLMNDDGLNRNLMQLINDSNLSFKSIIEKEQVSTTDKDLQSIVAELAGSPAIKKGILQSLKIVDELVSVMGYPPQTIVVEMARENQTTNKGKNNSKPRYKSLEKAIKEFGSQILKEHPTDNQELKNNRLYLYYLQNGKDMYTGQELDIHNLSNYDIDHIVPQSFITDNSVDNLVLTSSAGNREKGDNVPPLEIVQKRKIFWEKLYQGNLMSKRKFDYLTKAERGGLTEADKARFIHRQLVETRQITKNVANILHQRFNYKTDGNKDTMETVRIVTLKSALVSQFRKQFQFYKVREVNDYHHAHDAYLNGVVANTLLKVYPQLEPEFVYGEYHQFGWFKANKATAKKQFYTNIMLFFAQKDRIIDENGEILWDKRYLETVKKVLGYRQMNIVKKTEIQKGEFSNVTPNPKGKSNKLIPRKKDWDPIKYGGFDGSKMAYAIIIEYEKQKRKVRIEKKLIQINIMEREAFEKDEKTFLEEKGYHQPKVLIKVPKYTLYECKNGRRRMLGSANEAHKGNQMLLPNHLMALLYHAEKYEAIDGESLAYIEVHRALFDELLAYISEFARKYTLSNDRLDEINMLYERNKDGDVKSIAESFVSLKKFNAFGVHQDFSFFGTKIERKRDRKLNELLNSTIIYQSITGLYESRKRLDN

SEQ ID NO: 110 - protein, 1337 aa, Enterococcus faecalis
MKKDYVIGLDIGTNSVGWAVMTEDYQLVKKKMPIYGNTEKKKIKKNFWGVRLFEEGHTAEDRRLKRTARRRISRRRNRLRYLQAFFEEAMTALDENFFARLQESFLVPEDKKWHRHPIFAKLEDEVAYHETYPTIYHLRKKLADSSEQADLRLIYLALAHIVKYRGHFLIEGKLSTENISVKEQFQQFMIIYNQTFVNGESRLVSAPLPESVLIEEELTEKASRTKKSEKVLQQFPQEKANGLFGQFLKLMVGNKADFKKVFGLEEEAKITYASESYEEDLEGILAKVGDEYSDVFLAAKNVYDAVELSTILADSDKKSHAKLSSSMIVRFTEHQEDLKKFKRFIRENCPDEYDNLFKNEQKDGYAGYIAHAGKVSQLKFYQYVKKIIQDIAGAEYFLEKIAQENFLRKQRTFDNGVIPHQIHLAELQAIIHRQAAYYPFLKENQEKIEQLVTFRIPYYIGPLSKGDASTFAWLKRQSEEPIRPWNLQETVDLDQSATAFIERMTNFDTYLSSEKVLPKHSLLYEKFMVFNELTKISYTDDRGIKANFSGKEKEKIFDYLFKTRRKVKKKDIIQFYRNEYNTEIVTLSGLEEDQFNASFSTYQDLLKCGLTRAELDHPDNAEKLEDIIKILTIFEDRQRIRTQLSTFKGQFSAEVLKKLERKHYTGWGRLSKKLINGIYDKESGKTILGYLIKDDGVSKHYNRNFMQLINDSQLSFKNAIQKAQSSEHEETLSETVNELAGSPAIKKGIYQSLKIVDELVAIMGYAPKRIVVEMARENQTTSTGKRRSIQRLKIVEKAMAEIGSNLLKEQPTTNEQLRDTRLFLYYMQNGKDMYTGDELSLHRLSHYDIDHIIPQSFMKDDSLDNLVLVGSTENRGKSDDVPSKEVVKDMKAYWEKLYAAGLISQRKFQRLTKGEQGGLTLEDKAHFIQRQLVETRQITKNVAGILDQRYNANSKEKKVQIITLKASLTSQFRSIFGLYKVREVNDYHHGQDAYLNCVVATTLLKVYPNLAPEFVYGEYPKFQAFKENKATAKAIIYTNLLRFFTEDEPRFTKDGEILWSNSYLKTIKKELNYHQMNIVKKVEVQKGGFSKESIKPKGPSNKLIPVKNGLDPQKYGGFDSPVVAYTVLFTHEKGKKPLIKQEILGITIMEKTRFEQNPILFLEEKGFLRPRVLMKLPKYTLYEFPEGRRRLLASAKEAQKGNQMVLPEHLLTLLYHAKQCLLPNQSESLAYVEQHQPEFQEILERVVDFAEVHTLAKSKVQQIVKLFEANQTADVKEIAASFIQLMQFNAMGAPSTFKFFQKDIERARYTSIKEIFDATIIYQSTTGLYETRRKVVD

SEQ ID NO: 111 - protein, 1426 aa, Capnocytophaga ochracea
MKNILGLDLGTTSIGFAHIVEDENKEKSEIKELGVRIVSLTTDEQSDFEKGKSITTNANRTLKHGARLNLDRYQQRRKYLIDLLQKANLITPSSILAENGKNTTHSTWQLRAKAVTERIEKEEFARILLAINKKRGYKSSRKAKTEDEGQAIDGMAIAKRLYDENLTPGQLSLQLLQQNKKLLPDFYRSDLQKEFDLVWNFQKQFYPDILTDIFYKELQGKGKDATSKAFSKRYHFDTTENKGSKESVRLQAYQWRAEAISKQLSKEEVAYVLTEINNNLNNASGYLGAISDRSKELYFNRQTVGQYLYAKLQENRHNSLKNKVFYRQDYLDEFERIWETQASFHKELTDELKKQIRDVVIFYQRKPKSQKGLISFCEFESKEIEIEKDGKTITKNIGARVVPKSSPLFQEFKIWQILNNVICKRKGIRKKKISAKTTQLDLLNESSQTIFSLDMECKQLLFDELNLKGDLKSDKVLKLLGYSPQEWEINYNQLEGNRTQKALYEAYLKIVEMEAHDVKDILQIKSAKDDWSLDESPLSASEIREKVKAIFQTLGICTKILYFDPLLPVKEFEEQDSYQLWHLLYSYESDDSTSGNETLYRILEKKYAFKREHARILANVALQDDYGSLSTKAIRKIYPNIKENQYSTACEKAGYKHSKLSLTTEELEARELKNIIPLLKKNALRNPVVEKILNQMINVVNALIEKNSERDAEGKITKYFHFDEIRIELARELKKNAQKRYEMTQNINKAKLEHQKISEILQKEFGIKNPTKSDIIRYRLYQELEHNGYKELYTNAPIARDMLFSKNIEIEHIVPKARVFDDSFSNKTLTFHRINSDKGEYTAFDYITSLNSEEELNQYLTRVENAYKTKSISPTKYKNLLKKASEIGDDFINRDLRDTQYIAKKAKEILFQVTKNVLSTSGSITDRLREDWGLVDVMKELNMPKYQSLGLTEVEERKDGNKVTVIKNWTKRNDHRHHAMDALTVAFTKPSYIQYLNHLNARKDENNKNYSVILAIEEKETIKVPTNNGKNKRVFIEPIPNFRQVAKKHLEEIFISHKAKNKVVTKNTNKPAGTDKQQITLTPRGQLHKETIYGKYQYYINKEEKIGVKFDERTIAKVSNPVYREALLKRLQANDNDPKKAFAGKNALSKNPIYLDESKTKTLPEKVNLTYLEEDFSIRKDISPDNFKDLKSIEKVIDQGVKRILIKRLQAYDNDPKKAFVDLEKNPIWLNKEKGIAIKRVTISGVNNAQPLHIGKDHLGKTTLNKEGKEIPVDYVSTGNNHHVAIYRDKEGNLQEQIVSFFDAVVRAQQGIPIIDKTYKQAEGWQFLFTMKQNEMFVFPNATTGFNPAEIDLLDPKNKKLISPNLFRVQKIATKDYFFRHHLETNVETDNILKNVTWKREGLSGLKDIVKVRINHLGDIVSIGEY

SEQ ID NO: 112 - protein, 1424 aa, Parabacteroides sp.
MKRILGLDLGTNSIGWALVNEAETDEEVSSIIRLGVRVNPLTVDETQNFEKGKSITTNAERTLKRSMRRNLQRYKLRRDALVEFLKELGFITDETILSEQGNRTTFETCRLRAKAAEEEISLEELSRVLLMINKKRGYKSSRKVKKEEDGVLIDGMEIAKKLYEEDLTPGQLCSQLLESGKKVLPDFYRSDLQEELDRIWSVQKQFHPDVFCDAAKEEIKGKNRSQTWAILANYFVWKEEVVGWNDREAKNETIEKECKLVGLKRTTKGYELKKENYRWRAQALTEQLGLEEIAVVLQEINGQINASSGYLGAISDRSKVLYFNHQTVGQYQMAELDKNPHASLRNMVFYRQDYLDEFDRIWEKQAEFHKELTAELKKEIRDMIIFYQRRLKSQKGLISFCEFERLEIVVEKDGKKQTKVIGCKVIPRSHPLFQEFKVWQTLNDIKVLGREKKRNALSASESRALYPEEKEILARELAIKENMKKADVLKLLFENPQELDLNFKQIDGNRTGFSLFSAYSKMIEKYGYEPLDFKKPADEIIGQLRTIFTDLGWNTNLFTIDLTKEGKELEMQPYFRLWHLLYSFEGDNTSTGNGKLIEKIMQLCGVEKEYAVELASLSFQDDYGSLSAKAIKRILPYLKEGNLYDVACEYAGYRHSKSSLTKEEIENKVLKGKLEVLPKNSLRNPVVEKILSQMVNVINTIIDTYGKPDEIRVELARELKKSAKEREELTKAIAKSTREHEEIRKLLQDEFGMMNVSRNDIIRYKLYEELKDNGYKTLYSNQYIPKEKIFSKEIDIEHIIPQSRLFDDSLSNKTLEYKAINIEKGNKTAYDFVKEKYGEEGLQQYINRCESLFNDKKAKLRKLKMEQKDIPDGFIDRDLRNTQYIAKKALAMLNEICRRVVATTGSITDQLREDWQLVDVMKELNLPKYEALGFVETYEDKDGRKIKRIKDWTKRNDHRHHAMDALTVAFTKDAFIQYFNNKNAAQDSGNRNHTNIIGIKTRYFDKGRALPPIPLEQFRIEAKQHLEKLLVSIKAKNKVVTVNVNRTKKRKGENTKIQQTPRGQLHLETVYGSHKQYVTKIEKVNASFDAAKIATVSKRAYRNALLKRLETFGNDPKKAFTGKNALEKNPLYADKYQTIRVPEKVQTVEFETIYTIRKPVDPALNVDKVVDVKVRAILERRLKEYGGDPKKAFVNFWENPIWLNKEKGISIKRVSIRGINNAQSIHVKKDKNGNPIWDENGKQIPVDFVNTGNNHHVAIYRKPVLDKKGQVTFDEDGNLMYELDEVVVPFFEAVTRANLGLPIIDKDYRKSEGWQFLFSMKQNEYFVFPNEKTGFNPKEVDLLNPDNYAMISPNLFRVQTMSKVMYGNNVVRDYKFRHHLETTVKDMKELKDIAYKQYKTLSFGNSVVKIRINHIGQIVSVGEY

SEQ ID NO: 113 - protein, 1395 aa, Lactobacillus jensenii
MKEIKDYIIGLDIGTNSCGYVVTDKQNNILKLKGKTAIGARLFKEGQAAADRRSFRTTRRRLARRHWRLGLLEEIFDPEMEKIDPNFFRRLKESDYSPKDSRKQFNAIVFKSIKADKRFYKKYPTIYHLRNALMHDNQKHDLREIFMAVHHIVKYRGNFLREDSVNAFKAAKFSLRGEDGIGPVDKLNDLLKEIYSEYSPELATNNLSKIEDIIKDKNLYKQDKLKQVATLLIKEADSKDKAKLNKDIAKQVANSFMGYMFRLDTLFSLTDVDVKDYKLKFSDANIDESLDDLTSLLTDAQIEFVLELQSIYNTIVLNEIVPDGMSLSESMIKKYDDHKEDLKIFKEYIDSLSDQKKAKKLLSAYNLYVNYRKSDLVEAKNLFKNKKVGDKNFADVISNFEVFGKFVSDNLDDSELANKIKARLDLGEFLPKQRTNQNGVIPYQLHQVELTQILEKQGKYYPFLITPNPVESHRNNAPYEISELVSFRVPYYVGPLIDNQSIKDKQNKNKFAWMVRQKQGQITPWNLEEMVDTTESANQFIKRMTRKDTYLLAEDVLPKSSLVYQKFMILDELNRIKIDGKKLTSELKHDIFEKLFKKQKSINLDNLKNYLLVEGNIPGLIEGLSDGINFNNSFSTYIDYRNIFGDEIDNPNKQADFEKMIEWSTVFEDRKIFKRKLKEITWLTSEQIKQVSSKRYSGWGRLSKKLLTQITDENGVNILQRLWNEPETLTEVLANPVIKRKIVEANSSFTKAKDMKDILVEAYTSPQNKKAIRQVMRVVDDIIAAAHGKKPSQIAIEFAREDQDNPQMTKSRKAQLDQIYAKISDEFLDDAVKNELKNMKDNKPLAKDKVFLYFKQMGRDAYSGEKLSLDNLQDYDIDHIYPQSFIKDDSFDNRVLVQRAYNNGKSDNVPVLLFGNKIAAGLGITIRQMWKKWLELGLISKRKFNNLITDPEKISRNMASGFVNRQLVETSQVIKLVANILQAKLPDTEIIEVKASYNSILRKEFNLYKSREVNDYHHAIDAYLTTIVGNYLYQVYPKLRPYFVYGQFKKFGKAENQEDDPVKKIKKFNFIYQLIWGKDDAICISHTNQQVFSKKDIIDKLTTAYNFKYMNISHAVYTRNNNMFKQTLFPIIERTTAKTKSLIPKKLDRPTDIYGGYSNNNDAYLALVKVDKKRGSEYRVVGIPMRAAAMLKASKNYDEDLRKVIEPMVMFDKNGKAKRGIEGFRVLVGKMPFKQAVLDGNKKFMLTGTVDTPNLKQLVLSQQNMKYILDYIEDVDCRKHKFGDKVQNPDKCLLEVFDEIIEIVDKYFELFDSRDFREKLRNSRNKFIKLEASKKADTILAILKGLQAKSTRATIKELNISDFGRIITSSISPEAQLIYQSPTGLFERRVKVKDL

SEQ ID NO: 114 - protein, 1140 aa, Roseburia intestinalis
MRENGSDERRRNMDEKMDYRIGLDIGIASVGWAVLQNNSDDEPVRIVDLGVRIFDTAEIPKTGESLAGPRRAARTTRRRLRRRKHRLDRIKWLFENQGLINIDDFLKRYNMAGLPDVYQLRYEALDRKLTDEELAQVLLHIAKHRGFRSTRKAETAAKENGAVLKATDENQKRMQEKGYRTVGEMIYLDEAFRTGCSWSEKGYILTPRNKAENYQHTMLRAMLVEEVKEIFSSQRRLGNEKATEELEEKYLEIMTSQRSFDLGPGMQPDGKPSPYAMEGFSDRVGKCTFLGDQGELRGAKGTYTAEYFVALQKINHTKLVNQDGETRNFTEEERRALTLLLFTQKEVKYAAVRKKLGLPEDILFYNLNYKKAATKEEQQKENQNTEKAKFIGMPYYHDYKKCLEERVKYLTENEVRDLFDEIGMILTCYKNDDSRTERLAKLGLVPIEMEGLLAYTPTKFQHLSMKAMRNIIPFLEKGMTYDKACEEAGYDFKADSKGTKQKLLTGENVNQTINEITNPVVKRSVSQTVKVINAIIRTYGSPQAINIELAREMSKTFEERRKIKGDMEKRQKNNEDVKKQIQELGKLSPTGQDILKYRLWQEQQGICMYSGKTIPLEELFKPGYDIDHILPYSITFDDSFRNKVLVTSQENRQKGNRTPYEYMGNDEQRWNEFETRVKTTIRDYKKQQKLLKKHFSEEERSEFKERNLTDTKYITTVIYNMIRQNLEMAPLNRPEKKKQVRAVNGAITAYLRKRWGLPQKNRETDTHHAMDAVVIACCTDGMIQKISRYTKVRERCYSKGTEFVDAETGEIFRPEDYSRAEWDEIFGVHIPKPWETFRAELDVRMGDDPKGFLDTHSDVALELDYPEYIYENLRPIFVSRMPNHKVTGAAHADTIRSPRHFKDEGIVLTKTALTDLKLDKDGEIDGYYNPQSDLLLYEALKKQLLLYGNDAKKAFAQDFHKPKADGTEGPVVRKVKIQKKQTMGVFVDSGNGIAENGGMVRIDVFRVNGKYYFVPVYTADVVKKVLPNRASTAHKPYGEWKVMEDKDFLFSLYSRDLIHIKSKKDIPIKMVNGGMEGIKETYAYYIGADISAANIQGIAHDSRYKFRGLGIQSLDVLEKCQIDVLGHVSVVRSEKRMGFS

SEQ ID NO: 115 - protein, 992 aa, Treponema vincentii
MQKNSGEDENCGFEFLTEEEKELIKPLFFRISKPSFQFADIEKKLKGKNGFWKFNYRKDTNVSGCPVSAGLKNIFGDEASAESWKDKKVGQYDMCDIWHVLFDFDDEEKLLEFAKRKLFLSDEAAKKFCAIRIQQGYANLSLKAIRKITPFLRKGYIYSTAVFLANIPFMIGRDIFLQNEKEIEDSVKNIIGTLRDKNNIIVLANRCIESAFKDKDNDFRFEEWDKALVENSAWDLFGKKKWNEYDEEKRKTIISQVSEKVEDNLKIAVGKNPNDYKYPLLRTDDLIMDYLNQKGFVVKGELYHPSDTDYNFETPVPAEDGKIYLASPRSPSVKNPVVMRALHQLRKLVNYLIKTGKIDSTTKINVELANDVNDKNQRKAIEELAKTNEKNNADARKKIEELCNEAGFKVVPTESDIKKFRLWKEQNETCPYTGKHISFTDLFGPIPKFDFEHTIPRSLSYDDSLENLTLCDSEFNRNIKKQRLPSELPDFEEINKRFLKFYEDKIDNCLRIIELNSKSGGSYEEPAVKDLRIVKKHKAQYELNYYKEKLRRFSSTEITSGFKHSQLNDTRIITKFSLSYLKGVFDHVQPVKGSMTDTFKRQWGLMERNEIKDRSNHTHHTVDALTVACINRGKFNLLSEAIKNSSDGKHLKFPKPWETFDTDVLNAVRYIIPKYFSDESSLRQSKKILRGRDGKPVLKNGKAVFIQGATARGSLHKDTFYGCIKTVPEKGGKSEMIFVQRIPVSTLDEKVAEKIIDKRIRKTFEKNLSTGIQTLQEIQTDGILLPFKKEGRDVFVKRVRIKAHPTSPIILKKHHNVINKNPKDYKQNYYVENEENYLLAIYRGKDAKGKDVSDHKLCNLLNAVKSRQNKTGFYPDFKEKKGINLQLYKVLKIGKIVILQNDIQEDVFALPKEKLWKRMYRIAGLATSRNDIQIKLVHIIRETPWGYMKGEKDLNAGKECLLYGTANFKGLVEGQDFTVSPAGEIIQKARVC

SEQ ID NO: 116 - protein, 1340 aa, Enterococcus faecium
MKKEYTIGLDIGTNSVGWSVLTDDYRLVSKKMKVAGNTEKSSTKKNFWGVRLFDEGQTAEARRSKRTARRRLARRRQRILELQKIFAPEILKIDEHFFARLNESFLVPDEKKQSRHPVFATIKQEKSYHQTYPTIYHLRQALADSSEKADIRLVYLAMAHLLKYRGHFLIEGELNTENSSVTETFRQFLSTYNQQFSEAGDKQTEKLDEAVDCSFVFTEKMSKTKKAETLLKYFPHEKSNGYLSQFIKLMVGNQGNFKNVFGLEEEAKLQFSKETYEEDLEELLEKIGDDYIDLFVQAKNVYDAVLLSEILSDSTKNTRAKLSAGMIRRYDAHKEDLVLLKRFVKENLPKKYRAFFGDNSVNGYAGYIEGHATQEAFYKFVKKELTGIRGSEVFLTKIEQENFLRKQRTFDNGVIPHQIHLSELRAIIANQKKHYPFLKEEQEKLESLLTFKIPYYVGPLAKKQENSPFAWLIRKSEEKIKPWNLPEIVDMEGSAVRFIERMINTDMYMPHNKVLPKNSLLYQKFSIYNELTKVRYQDERGQMNYFSSIEKKEIFHELFEKNRKVTKKDLQEFLYLKYDIKHAELSGIEKAFNASYTTYHDFLTMSENKREMKQWLEDPELASMFEEIIKTLTVFEDREMIKTRLSHHEATLGKHIIKKLTKKHYTGWGRLSKELIQGIRDKQSNKTILDYLINDDDFPHHRNRNFMQLINDDSLSFKKEIKKAQMITDTENLEEIVKELTGSPAIKKGILQSLKIVDEIVGIMGYEPANIVVEMARENQTTGRGLKSSRPRLKALEESLKDFGSQLLKEYPTDNSSLQKDRLYLYYLQNGRDMYTGAPLDIHRLSDYDIDHIIPRSFTTDNSIDNKVLVSSKENRLKKDDVPSEKVVKKMRSFWYDLYSSKLISKRKLDNLTKIKLTEEDKAGFIKRQLVETRQITKHVAGILHHRFNKAEDTNDPIRKVRIITLKSALVSQFRNRFGIYKVREINEYHHAHDAYLNGVVALALLKKYPQLAPEFVYGEYLKFNAHKANKATVKKEFYSNIMKFFESDTPVCDENGEIFWDKSKSIAQVKKVINHHHMNIVKKTEIQKGGFSKETVEPKKDSSKLLPRKNNWDPAKYGGLGSPNVAYTVAFTYEKGKARKRTNALEGITIMEREAFEQSPVLFLKNKGYEQAEIEMKLPKYALFELENGRKRMVASNKEAQKANSFLLPEHLVTLLYHAKQYDEISHKESFDYVNEHHKEFSEVFARVLEFAGKYTLAEKNIEKLEKIYKENQTDDLAKLASSFVNLMQFNAMGAPADFKFFDVTIPRKRYTSLTEIWQSTIIHQSITGLYETRIRMGK

SEQ ID NO: 117 - protein, 1363 aa, Lactobacillus rhamnosus
MTKLNQPYGIGLDIGSNSIGFAVVDANSHLLRLKGETAIGARLFREGQSAADRRGSRTTRRRLSRTRWRLSFLRDFFAPHITKIDPDFFLRQKYSEISPKDKDRFKYEKRLFNDRTDAEFYEDYPSMYHLRLHLMTHTHKADPREIFLAIHHILKSRGHFLTPGAAKDFNTDKVDLEDIFPALTEAYAQVYPDLELTFDLAKADDFKAKLLDEQATPSDTQKALVNLLLSSDGEKEIVKKRKQVLTEFAKAITGLKTKFNLALGTEVDEADASNWQFSMGQLDDKWSNIETSMTDQGTEIFEQIQELYRARLLNGIVPAGMSLSQAKVADYGQHKEDLELFKTYLKKLNDHELAKTIRGLYDRYINGDDAKPFLREDFVKALTKEVTAHPNEVSEQLLNRMGQANFMLKQRTKANGAIPIQLQQRELDQIIANQSKYYDWLAAPNPVEAHRWKMPYQLDELLNFHIPYYVGPLITPKQQAESGENVFAWMVRKDPSGNITPYNFDEKVDREASANTFIQRMKTTDTYLIGEDVLPKQSLLYQKYEVLNELNNVRINNECLGTDQKQRLIREVFERHSSVTIKQVADNLVAHGDFARRPEIRGLADEKRFLSSLSTYHQLKEILHEAIDDPTKLLDIENIITWSTVFEDHTIFETKLAEIEWLDPKKINELSGIRYRGWGQFSRKLLDGLKLGNGHTVIQELMLSNHNLMQILADETLKETMTELNQDKLKTDDIEDVINDAYTSPSNKKALRQVLRVVEDIKHAANGQDPSWLFIETADGTGTAGKRTQSRQKQIQTVYANAAQELIDSAVRGELEDKIADKASFTDRLVLYFMQGGRDIYTGAPLNIDQLSHYDIDHILPQSLIKDDSLDNRVLVNATINREKNNVFASTLFAGKMKATWRKWHEAGLISGRKLRNLMLRPDEIDKFAKGFVARQLVETRQIIKLTEQIAAAQYPNTKIIAVKAGLSHQLREELDFPKNRDVNHYHHAFDAFLAARIGTYLLKRYPKLAPFFTYGEFAKVDVKKFREFNFIGALTHAKKNIIAKDTGEIVWDKERDIRELDRIYNFKRMLITHEVYFETADLFKQTIYAAKDSKERGGSKQLIPKKQGYPTQVYGGYTQESGSYNALVRVAEADTTAYQVIKISAQNASKIASANLKSREKGKQLLNEIVVKQLAKRRKNWKPSANSFKIVIPRFGMGTLFQNAKYGLFMVNSDTYYRNYQELWLSRENQKLLKKLFSIKYEKTQMNHDALQVYKAIIDQVEKFFKLYDINQFRAKLSDAIERFEKLPINTDGNKIGKTETLRQILIGLQANGTRSNVKNLGIKTDLGLLQVGSGIKLDKDTQIVYQSPSGLFKRRIPLADL

SEQ ID NO: 118 - protein, 1234 aa, Prevotella tannerae
MPNFWSIFTENLQTYLMKTRILGLDTGTNSLGWAVVDRDENNQYTPICRGDLIFTEGVKQEKGIEFSLAAERTSYRASRRHYFRRRLRKVEVLKVLVKHKLCPPLSDEALNRWHTKKEYPLDEDFILWQRTNEADNKNPYHDRHICLHRKLNLKDSQTDRYTLGRALYHLTQRRGFLSNRLDQNEEAEETGKVKSAISELSKEMKEAGCEFLGDYFYLLYRTEGNRVRIRSRYTDREKHYLQEFKEICRVQELDEDLAKALEKTIFFQRPLKSQRQGVGKCTMEKGHSRCAVSHPLYEEYRLLCYLNNIRIKTPSDDRLRPLNAEEREKITPLFYKEKNFDFEKIAKKLAGKTPFGWIRDAEDWPYQFNYRMTQEAPACPTTAQLIKVFGEDWKAALAETYTMSAKQDGTLKTEDEICTDIWNVLYSFSSKEKLKEFGLKKLQLDEVQAKAFSEIRLTRDFASLSLKAIRKILFFLRTGEDYSKAIFLANIPTIVGEEIWNDIERRSRLLYKVDLALRPQEERDAEEHRTIAERIKAAVAAEVPDAPIDLLYHPSMIEAYPDAKRNERFDCYQLGSPKTNAVRNPMAMRSLHMVRKVINHLLRKHIIDEKTEIHIEYARELNDANKRQAIADWQRELSKRHTAYAQNIRQLYKAETGLVIEPTKADILKYQLWEEQQHVCLYTGKKIGIADFLGANPKFDIEHTIPRSRGGDSTQENLTLCESKFNRDIKRDKLPTELANYEEILARIEHWKKQCYALKLKRDGIRTHSGLEKSIKDSRIRRRHLVGLEYGYLKGKYDRFTMKEVPEGFSRRQGAGIGLISKYAGLFLKSLFKDPKNPNRSNVYVVKGAITAEFRKLWGLQQADEAKSRENHTHHCIDAYTIACIGPCEYAALAAYYRSDEEFKYGRRREKPQFEKPWPTFTEDLLKLQEELLIVHQTTDKLGKRDRRKVKTPRGKFLTGGDSARGRLHQETYYGAINYDGNIKYVVRKPLDSLTEKDLDKIVDETVMGIVKGAVEAKGSLKEALADGIYMNKEKGILIKRVRIFSDVSEPINLKQLRDVSTKEYKRHIHLRKDENYLFAIYEGIDKKKNKKQTETATVDYLDAAKFYKDSKRRDKANSLVGDYSKKNKLPLKCILKKRQMVLFYEHSPEEIRFKDKKDLSRRLYIVTSIAKDGRVKFLHHQAATATGIQSSPSPFTNDGEHQPYYRLSASNIKVLVAGIDFDINILGEITPKL

SEQ ID NO: 119 - protein, 1496 aa, Prevotella veroralis
MKTILGLDLGTNSIGWAKVCVDDNGNYLRDIKLGSRIIPMSQDVLGNFDKGVTESQTSVRTGFRGVRRIRERSLLRRERLHRVLHVLGYLPPHYDSAIGWNKNEPSTYGKFLNHGEPKLAWEHKEDGSMRFLFMESFHEMMADFAKSQPSLVSDGKKIPLDWTIYYLRKKALSQPIRKEELAWLLLNFNQKRGYYQLRGEEDDDNPTKCEEYYELKVVGIEADEEGKNGNTWYNVKLENGWIYRRQSKIPLDDWIGKVREFIVTTEYEKDGITLKKDKNGDVKRSFRSPSEDDWGLRKKRTEKLLDSSKMTVGAFVYDHLLAEPSDKIRGKFIRTIERKYYKKELYAILCEQSKYHEELRSGDYLNKCAEELYKNNQPHRNSLLTKDLAYLLLEDLIFYQRPLKTKKSLIAECPYEAYKYVDKETGEIKRQGIKCIAKSNPYYQEFRLWQFISNLRLFNKADDKEVTADYLPTQDDYVRLFAYLNDRKEINQETLLKEFFKLKKITVNSEKVFPIRWNYIEDKEKKYPCNETRHELLLALDRARIDHSWLEKPGQEYRLWHLLYSVESKEETKEALRKLKDDDAFVESFLKVKPFKREYGAYSEKAIKKLLAVMRMGSLWRETDICDTTKGNITKILQGEIDEKLKEKISASVSSYNQLSDFQGLPVWLACYVVYGRHSEAAEIQHWKTPESLLAYINGFKQHSLRNPIVEQCILETLRTVHDIWKEVGHIDEIHVELGRNMKSTADQRARISENVLRNENTNLRIKSLLLELKNDPNIKDVRPYSPMQQEKLRIYEEGVLQELTKDDKDFTEITKISTMAQPSAKELQRYKLWLEQKYRSPYTGKSISLTKLFTSAYQIEHVIPQSRYFDDSFSNKVICESEVNSLKDNMLGYEFIKNHGGEIIHCTMLGDVKVLSESEYKAFVNDHYAHNKRKRENLLLEDIPQEFLNRQMNDSRYISKVVKALLSNIVRAEGEEEATSKFVVSCSGGITDRLKKDWGLNDVWNKIVYPRFERLNRLTGTEAFGQWENKDGKRVFQTAVPLELQRGFNKKRIDHRHHAMDALVIACTSRNIINYLNNESANNPKKREDLRQKLCDKNRTIRKPWETFTQDATAALEDVIVSFKNYVRIINKATNYYERYDVEGKKVIAEQRGDDMWAIRKPMHEATYYGRVNLRRKKKVNLRVALENISSICDNKLRIYINGLVEKGFNTKQILDKFKNTNDHFSMQKIDKVEIWQFTNEEEKLVATRKPLDTSFDTKKIASITDTGIQTILLNYLETKGGDSTIAFTPEGIVEMNQNISKYNNGKEHMPILKVRLYTKLGKKIPVGQTGCKAKQFVIAEAGTNLYFAIYEDEEGKRSYRTIPLNEVVERLKQGLSPVPEKNDKDVHLKFYLSPNDLVYVPIEDEHESLAKDHIYKFVDSSGTTANFIPHRSANVIFELNKKDAEKFCSGSIIQNEYGVGSSQSKNQKAITGEMIKAVCRKLEVDRLGNVIKVI

SEQ ID NO: 120 - protein, 1082 aa, Neisseria cinerea
MAAFKPNPMNYILGLDIGIASVGWAIVEIDEEENPIRLIDLGVRVFERAEVPKTGDSLAAARRLARSVRRLTRRRAHRLLRARRLLKREGVLQAADFDENGLIKSLPNTPWQLRAAALDRKLTPLEWSAVLLHLIKHRGYLSQRKNEGETADKELGALLKGVADNTHALQTGDFRTPAELALNKFEKESGHIRNQRGDYSHTFNRKDLQAELNLLFEKQKEFGNPHVSDGLKEGIETLLMTQRPALSGDAVQKMLGHCTFEPTEPKAAKNTYTAERFVWLTKLNNLRILEQGSERPLTDTERATLMDEPYRKSKLTYAQARKLLDLDDTAFFKGLRYGKDNAEASTLMEMKAYHAISRALEKEGLKDKKSPLNLSPELQDEIGTAFSLFKTDEDITGRLKDRVQPEILEALLKHISFDKFVQISLKALRRIVPLMEQGNRYDEACTEIYGDHYGKKNTEEKIYLPPIPADEIRNPVVLRALSQARKVINGVVRRYGSPARIHIETAREVGKSFKDRKEIEKRQEENRKDREKSAAKFREYFPNFVGEPKSKDILKLRLYEQQHGKCLYSGKEINLGRLNEKGYVEIDHALPFSRTWDDSFNNKVLALGSENQNKGNQTPYEYFNGKDNSREWQEFKARVETSRFPRSKKQRILLQKFDEDGFKERNLNDTRYINRFLCQFVADHMLLTGKGKRRVFASNGQITNLLRGFWGLRKVRAENDRHHALDAVVVACSTIAMQQKITRFVRYKEMNAFDGKTIDKETGEVLHQKAHFPQPWEFFAQEVMIRVFGKPDGKPEFEEADTPEKLRTLLAEKLSSRPEAVHKYVTPLFISRAPNRKMSGQGHMETVKSAKRLDEGISVLRVPLTQLKLKDLEKMVNREREPKLYEALKARLEAHKDDPAKAFAEPFYKYDKAGNRTQQVKAVRVEQVQKTGVWVHNHNGIADNATIVRVDVFEKGGKYYLVPIYSWQVAKGILPDRAVVQGKDEEDWTVMDDSFEFKFVLYANDLIKLTAKKNEFLGYFVSLNRATGAIDIRTHDTDSTKGKNGIFQSVGVKTALSFQKYQIDELGKEIRPCRLKKRPPVR

SEQ ID NO: 121 - protein, 1512 aa, Fibrobacter succinogenes
MKKILGLDLGTNSIGWAVVNADEITRDDGSRYLKPNGISAAGSRIIPMSADILGDFEKGNSISQTAERTRMRMARRLHERALLRRERLLRVLNLLDFLPKHFADKIDRYGKFTDDSEPKLAWRKNTEGKYEFIFQDAFNEMLAEFKDKQPEIVEEGKKIPYDWTIYYLRKKALEKALSKEELSWILLQFNQKRGYYQLRGEEEEIPQDKKIEYLAQKVVKVEATDQKKGDDVWYNVYLENGMIYRRTSKAPLDWEGKVKEFIVTTEVENDGETPKKDKEGNIKRSFRAPKEDDWTLLKKKTEADIENSHKTVGCYIYDSLLNNPKQKIIGKLVRTVERKFYKEELTQILKKQVELIPELRDDNLYKQCIEELYPINEAHRNTIAKTDFANLFINDILFYQRPLKSKKSQIDNCPYEERIFIDSKTGEKKKVPVKCIAKSNPLFQEFRLWQFIQNLRIYQREKEIDGKLLTDIDITSECLKSEEDYVRLFDWLNDRETIEQEDLLKHLFNTKKSKNKENPYRWNYVEDKVYPCNETRATILKGFSKCGINASVLSPELEMALWHILYSVEDKKEIETALTHFAQKQGWNDDFAKVFSKAKPFKKDYGSYSEKAIKKLLSLMRMGKYWNQDNIDKNTLDRIDKIINGEYDEKISNRVRDNAINLKDISDFRGLPVWLACYIVYDRHSEAKDCTKWNSPEEIDSYLKKFKQHSLRNPIVEQVVTETLRTVRDIWIQEEQIDEIHLELGRDLKNPADKRKKMSENILKNENTNLRIKAMLMEFMNPSMGIENVRPYSPSQQDILRIYEENALDNLTKDDKDFDFISKISKQAQPSKTDIIRYKCWLEQKYRSPYTGKTISLSKLFTPAYEIEHVIPQSLYFDDSFSNKVICEAEVNKLKDRQLGYKFIAEHHGEKVQLSQGEVVEILSVDAYEKFVKENYANNRIKMKKLLMESIPDEFIERQLNDSRYISKVVKGLLSNIVREKIDDENYEPEAVSKNLISCNGAITDRLKKDWGMNDVWNSIILPRFIRMNQITGKDCFTTTNAEGHLIPQMPLELQKGFNKKRIDHRHHAMDAIVIACTTRDHVNLLNNEAAHSKFNATRYQLQRKLRRFEKAVIDGKEREVAKEFLKPWDSFSSDSKNILENIIVSFKQNQRVINKTTNAFLHFDENGKKTFIKQGKGDSWAIRKSMHKDTVFGEINLRKVRSVSLNEAIKVPERVLNKKIKEKILELKNNKIDAKNIKKYIEENHTGGYGIDSSKIDVFYFTKETKERFFATRKTLDTSFNQAKIKDSIADSGIQKILLAHLKSKNGDAEQAFSPDGIDEMNKNIVELNNGKFHQPILKVRVYEKADKFAVGQKGNKKVKFVEAAKGTNLFFAIFEKDGKRSYLTIPLNVMIDCQKQYGNQWKNNIEAYLKEKELVEKDVKLQFILSPNDLVYLPTEGSIDKKRIYKVVSFTNNRLYAIPYAIAKSIVDKNEFTQLNKIEFTDNKESIKDACVPVIIDRLGNVIEFNGKRL

SEQ ID NO: 122 - protein, 1259 aa, Streptobacillus moniliformis
MKYILGLDLGVASIGWAVTEINEKGEPVGLIDANSVIFKPLDNDKGKLYNVERRDKRGSRRILRRKKHRVERTKMLLVNSSFLTNEEIDNLYVGKLDNIYEVRLKGLKEQLSKNEIARLMIYYCKNRGFKSNRKTEDLEILKSLGEKISEKDSDEKKLKPIIAKNTELIESKGLTPIEVIYMIRENDNSILGFKNKEGNYKFGFKRNQVIDEVRKILGTQQILSKEIVDEYIDILSSQRDFSDGPGGDSKYKIDYTKLAGKCKYTGEVRAVKSAPSYEIFTMLQKLNDIRYVKFTSEDKIEKKKLSKEVIHKLYDLVVEKNKTLTYDLIEKSIDEENIKLLNIPKLSKSKYVELRKSYFKERNDNENLTEEEINAFNEKLNNERMKQELIRNNLKAYKELKSKFKKNNIDENRIKELGGIYFLDLVAELLTYSKTDEKLEYFVENVERYSLFKEQRDIVEIIKTFPNYTKNGNLSLSLVRELNKLLMEGHDYESSLSSLNYYIDTDVDWEKFPTISEIEDSLSTKITNPNVKHILVILRKLYNTLLFKYGRPEKVHLELSRDFSNDFSTRNKIQKEQLENKVRREVAAFEMYGANKDIVAGKDRLSNDDFVRIKLWEEQNKVCMYSGRTIEKYQLTSAEVQIDHILPYSKSFDNSYSNKVLVFSNENQDKKERTPYQWLKGTEKWNEFKQRVRLNLNISNKKKENLLFEDEVVNNEFLERELHATSYSSRLALNIFQRLIPVSDEDKYDEHGNEKVKYLYNRNVIAFQGKMTSMLRNLYSLNKYTHSFESDTLDIDNKAFILKEFEINKDNLKMTAYNVNTGLEITSETKVEKNKSGEFKTIKDELLKKELDKKENLIEISDYFKDKVLFDLKIVDFEEIDTVEPEIISILYKMITALKEEVYSKNRENHLHHSLDAFLLTIMNRSMQMKLIKYNQLISVLKNKEIEIFNEEKGEYIDSKEFAEELQKQKIIDIDGNERGIKFNVNGKTHRLNLVKPYENFLDDIKNKIFDKRENNKLPYHVVKSKVSGALHAETILGESKGEITKRISVFDINYKNLGKIFDKDGSQKEIYETLVKWLEAKSKDYPKLKNGNIIKKVKIVDGNKDKLIKLGNKRYVEMGRTTVKILVLKKEAEEGLKFASIGRYKYNLLKSEKDVNISIWKDAIHFCKVRYNKLKENGYRLIHELIPGETIELELNKGNISKCLVVGFSGGKIEISSVIGDALDLINDKISTRIKERYYITVSTIKSIKKINKNILGD

SEQ ID NO: 123 - protein, 1091 aa, Mobiluncus mulieris
MDSRKYRVGIDVGTNSVGFAAVEEDDSGSPTRFLNTMVVIHDSGVDPEQKKYAITRLASAGTARRTRRLYRTRRQRLRELDDFISNELGYPLVNLENFADPYEPWKVRADLATTKLPNDELPEAMSIALRHMARHRGWRSPYQRVEALHLHAEISKEFAALKERVVEKTGDVFSDDATPAEVLVDLMGRQKVRGADGVLSGKLRQSDNANELRKIASVQGIDDETLNRIIDRVFSSKSPKGKASERVGMDALPGQGSKPRALKAMPSFQKFRVVSVICNLRIKDSGGDARPLSMEEKEKLIDYLMSSTTDDHVTWTDVADLLHVKRSQLQGTAKEGFDGERPYTRPPVNSTWSKIKDSKIKSLVALWKTGDVDVQSAIVEALSNASVLEDSRPGADIVVAYLESLDDKELESLDKVGLPAGRASYSEDSLERLTERMLRDDCDLFEARKREFNVADDWKPPADPIYAPVGNPGVDRVLKIVNRLLMAAEREWGAPTQINIEHVRSGFSSELMQREFERENERRRAQNEEAVKAILTEKGGNSRVSKYDITRYYAVKRQHCQCLYCGTPITFSDCELDHIVPRKGVGSTNTRVNLAAACRSCNRDKSNLPFAVWAGKASNFDVSIDDAVSRVKQWQRSQNEGVREFRAFQNEVISRLLKTTEDPEIDSRSLESVAWMARELHHRVEYYFQSKGAQTQVSVYRGAVTAQARKSSGLEDKVKMIGGGGKTRLDRRHHAMDAATIALMTPGISTTLSEKNNLRDAQKFTGQSETWKDYCGRTETARKHFAVWKSNMERLTDLFNDKLENDAIPVVQPLRLRLSNSKAHDDGIGKLDSKKLGSVWSLADIDRAATPQIWTALTRCDDFDPTKGLPENANRVIRAQGVKYESEDNIPVFPSNVAAIAVRDGYAEIGSTIHHARIYRIDDGKKTFYSMIRVFAVDLLKHQAEDLFTVKLPPSAISIRTCEDSLRRALSNGTAEYLGWLVPGDEIIVDTSDKAFHTGQIGDLLRNFPVNSFRLTGFPSNSRLRLKPVLLAGEGLRDDAEDSIKKILLGQGWRPAINVLFSKGKPRIVRRNSLGIERPSSNNGLPFSWEA

SEQ ID NO: 124 - protein, 872 aa, Candidatus Parvarchaeum
MLGSSRYLRYNLTSFEGKEPFLIMGYYKEYNKELSSKAQKEFNDQISEFNSYYKLGIDLGDKTGIAIVKGNKIILAKTLIDLHSQKLDKRREARRNRRTRLSRKKRLARLRSWVMRQKVGNQRLPDPYKIMHDNKYWSIYNKSNSANKKNWIDLLIHSNSLSADDFVRGLTIIFRKRGYLAFKYLSRLSDKEFEKYIDNLKPPISKYEYDEDLEELSSRVENGEIEEKKFEGLKNKLDKIDKESKDFQVKQREEVKKELEDLVDLFAKSVDNKIDKARWKRELNNLLDKKVRKIRFDNRFILKCKIKGCNKNTPKKEKVRDFELKMVLNNARSDYQISDEDLNSFRNEVINIFQKKENLKKGELKGVTIEDLRKQLNKTFNKAKIKKGIREQIRSIVFEKISGRSKFCKEHLKEFSEKPAPSDRINYGVNSAREQHDFRVLNFIDKKIFKDKLIDPSKLRYITIESPEPETEKLEKGQISEKSFETLKEKLAKETGGIDIYTGEKLKKDFEIEHIFPRARMGPSIRENEVASNLETNKEKADRTPWEWFGQDEKRWSEFEKRVTSLYSKKKISERKREILLNKSNEYPGLNPTELSRIPSTLSDFVESIRKMFVKYGYEEPQTLVQKGKPIIQVVRGRDTQALRWRWHALDSNIIPEKDRKSSFNHAEDAVIAACMPPYYLRQKIFREEAKIKRKVSNKEKEVTRPDMPTKKIAPNWSEFMKTRNEPVIEVIGKVKPSWKNSIMDQTFYKYLLKPFKDNLIKIPNVKNTYKWIGVNGQTDSLSLPSKVLSISNKKVDSSTVLLVHDKKGGKRNWVPKSIGGLLVYITPKDGPKRIVQVKPATQGLLIYRNEDGRVDAVREFINPVIEMYNNG

SEQ ID NO: 125 - protein, 1229 aa, Pediococcus acidilactici
MGDRKYNLGLDIGTSSIGFAAVDENNQPIRVKGKTAIGVRLFEEGKTAADRRGFRTTRRRLSRRRWRINLLNEIFDAHLAEVDPTFLARLKESNRSNLDPKKSFQGSLLFPERKDYQFYEEYPTIYHLRKALMEKDRKFDIREIYLAVHHIIKYRGNFLNGTPMRSFKVENIELNTLFDQLNQLYAEIVPDNELAFDLAQVADVKDVLSSTTIYKMDKKKQLVKMMLLPASNKALQSENKKIVTQFVNAILNYKFKLDVLLQVETDADWSLKLNDEGADDKLEEFTGDLDENRLEIIDLLQRLHNWFSLNEITKDGNSLSAAMVEKYENHHHHLGLLKKVIENHPDAKKAKALKETYTAYVGKTDDKTQNQDDFYKAVEKNLDDSPDAKGIKRLIQLDQFMPKQRTGQNGAIPHQLHQQELDQIIEKQSKYYPFLAEPNPNVKRRKDAPYKLDELIAFKIPYYVGPLVTPEEQAQNKENVFAWMKRKAAGPITPWNFDEKVDRMESANRFIRRMTTKDTYLFGEDVLPAESMIYQKFVVLNELNNLKINGRHLSLKDKQDVYNDLFKQQKTVSIKALQNYYVTKKKAATAPTVGGLADPKKFLSSLSTYIDFKNMFGERVNDPQFQEDLEQIVEWSTIFEDRGIFKAKLQALGWLSEKQIQQLVAKRYKGWGRLSKKLLTGLKNAEGYSILDEMWRSTENFMQIQSRPEFAALIQQANEKQFEGNDPDNVWENIENILGDAYTSPQNKKAIRQVVKVVQDIEKAVGNPPEKIAIEFTREAAANPQRTQSRLRTLEKLYESAEEVVDAGLTAELAEFKENKHVLSDKYYLYFTQLGRDVYTGDTISLDKLNDYDVDHILPQSFIKDDSLDNRVLTIRAVNNGKSDNVPAKMFGKKMGSFWRHLLDNGMISKRKYNNLITDPDNISKYAQKGFINRQLVETSQVIKLTANILNGIYDKDTEIIEVPAKMNSQMRKMFDLVKVREVNDYHHAFDAYLTIFIGNYLYKCYPKLRPYFVYDNFKKFGNKEDIGHKRFNFLGKIEREKKVVAPETGEILWSNVAPNETIKQIKKVYNYKFMIVSREITTRRAELFNQTVYPKNYRGKLIPIKEDRPTDLYGGYSGNTDAYLAIVALEDKKKGKYFKVVGIPTRAAAKLEKLKQQDSQQYLQALHEVIAPQFTKSTKKGIKKTEFEIVLDKVHYRQLVQDGPVKMMLGSSTYKYNAKQLVLSEKAL

SEQ ID NO: 126 - protein, 1398 aa, Veillonella parvula
METQASNQLISSHLKGYPIKDYFVGLDIGTSSVGWAVTNKAYELLKFRSHKMWGSRLFDEGESAVARRGFRSMRRRLERRKLRLKLLEELFADAMAQVDPTFFMRLRESKYHYEDKTTGHSSKHILFIDKNYNDQDYFKEYPTVYHLRSELMKSGTDDIRKLFLAVHHILKYRGNFLYEGATFDSNASTLDDVIKQALENITFNCFDCNSAISSIGQILMEAGKTKSDKAKAIEHLVDTYIATDTVDTSSKTQKDQVKEDKKRLKAFANLVLGLNASLIDLFGSVEELEEDLKKLQITGDTYDDKRDELAKAWSDEIYIIDDCKSVYDAIILLSIKEPGLTISESKVKAFNKHKDDLAILKSLLKSDRSIYNTMFKVDEKGLHNYVHYIKQGRTEETSCNREDFYKYTKKIVEGLSDSKDKEYILSQIELQILLPLQRIKDNGVIPYQLHLEELKAILAKCGPKFPFLNEVADGFSVAEKLIKMLEFRIPYYVGPLNTHHNVDNGGFAWAVRKASGRVTPWNFDDKIDREKSAAAFIKNLTNKCTYLLGEDVLPKSSLLYSEFMLLNELNNVRIDGKPLEKVVKEHLIEAVFKQDHKKMTKNRIEQFLKDNGYISETHKHEITGLDGEIKNDLASYRDMVRILGDGFDRSMAEEIITDITIFGESKKMLRETLRKKFASCLDDEAIKKLTKLRYRDWGRLSQKLLNGIEGCDKAGDGTPETIIILMRNFSYNLMELLGDKFSFMERIQEINAKLTEGQIVNPHDIIDDLALSPAVKRAVWQALRIVDEVAHIKKALPARIFVEVTRSNKNEKKKKDSRQKRLSDLYAAIKKDDVLLNGLNNEIFGELKSSLAKYDDAALRSKKLYLYYTQMGRCAYTGEIIELSLLNTDNYDIDHIYPRSLTKDDSFDNLVLCKRTANAQKSDAYPISEEIQKTQKPFWTFLKQQGLISERKYERLTRITPLTADDLSGFIARQLVETNQSVKAATTLLRRLYPGVDVVFVKAENVTDFRHDNNFIKVRSLNHHHHAKDAYLNIVVGNVYHERFTRNFRAFFKKNGANRTYNLAKMFNYDVNCTNAKDGKAWDVKTSMDTVKKMMDSNDVRVTKRLLEQTGALADATIYKATVAGKAKDGAYIGMKTKSSVFADVSKYGGMTKIKNAYSIIVQYTGKKGEVIKEIVPLPIYLTNRNTTDQDLINYVASIIPQAKDISIIYGKLCINQLVKVNGFYYYLGGKTNSKFCIDNAIQVIVSNEWIPYLKVLEKFNNMRKDNKDLKANVVSTRALDNKHTIEVRIVEEKNIEFFDYLVSKLKMPIYQKMKGNKAAELSEKGYGLFKKMSLEEQSIHLIELLNLLTNQKTTFEVKPLGITASRSTVGSKISNQDEFKVINESITGLYSNEVTIV

SEQ ID NO: 127 - protein, 1485 aa, Prevotella bivia
MKNILGLDLGTNSIGWAKISIDDNGKYIKDSIKLGSRIIPMSQDVLSNFSKGVTLSQTSERTSFRGARRLRERTLLRRERLHRILHLLGFLPKHYEKAIGWDRNDNKTYGKFINHAEPKLAWCKDNNGKMRFLFMDSFHDMLSEFSEKHPELLANGKKIPLDWTIYYLRKKALYKAITKEELAWILLNFNQKRGYYQLRGEEDRDSEANKKEYLELKVIGVEATGEKKGNDIWYNIHLENGWIYRRSSKNPLNDWLGKVKSFIVTTDLDADGNPKKDKDGNIKRSFRAPSEGDWTLIKKRTESLLENSGQTVGQFIYNHILEEPSAKIRGNFIRTIERKYYKDELKAILEKQKEFHHELSSESLLTECAKELYKRNIAHQEVLLKKGIIHLLLNDILFYQRPLKIKKSLIDNCPYENYKYVDKKSGDIKVKSIKCIAKSNPFFQEFRLWQFVSNLRLYRKSDDKDVTSEHLVTTDDYANLFTYLNNRKDIKQSVLLKEYFKIKKVKTINGAEYPVRWNYIDDDNKTYPCNETRYDILHALSKTELKSEWLTPERTYRLWHLLYSIESKEETKKALNKLNLSDDFTEAFLTIKPFKKEYGSYSEKAIKKLLSLMRMGYLWSEDEAIKQVGAEIEKTIEGELPDYVLQRLEKSQHNYNKISDFSGLPLWLASYIIYGRHSEAKEIIHWDNPESMMAYIKDFRQHSMRNPIVEQCVLETLRTVHDIWKEIGHIDEIHIELGREMKSTSEQRKAITQNVLHNQNTNIRIKLLLQELKNDNNITGVRPYSPMQQEILRIYEEGALQGLTKEDKDYNDILKISQTAQPTSNELTRYKLWLEQKYRSPYTGKAISLSKLFTSAYQIEHVIPQSRYFDDSLSNKVICESEVNTLKKAMLGMEFIKTCGGQKVHCTLLGDVEIYNEEDYKAFVNEHYSNNRTKRNKLLMEDIPQEFINRQLNDSRYISKMVKQLLSAIVRGQEEVEATSKFVIPCTGGITDRLKKDWGLNDIWNNLVSPRFQRMNALTGSEYFGHWENKEGKRVFQTTMPIQLQQGFSKKRIDHRHHAMDALVIACASRNIISYLNNETAQDTERRRDLRQKLCDKGGSVRKPWDSFTQDTQYALKDIIVTFKNYVRIINKATNYYEHYKTDGKKGMISQKGDELWAIRKPMHKETVFGKVNLRRPKRVSLSKAIDSVDIICNRKLKKYIKARLNEGLQKKQILNIFKELNNVWEGIDVNKIDIWEMSNDKEPMVATRKQLDTSFDEKKIRSISDTGIQKILLNYLITKNNNPELAFTPEGIQEMNSNISEYNDHKKHQPIYKVRVTEPLGAKYPIGTMGNNPKKFVEAQAGTNLYFAIYEDKEGKRNYDTIPLNIAAERLNQQLSPVPETNENNTPLKFYLSPNDLVYVPSEEERHSGNNIQLDKNRIYKMVSSTSKRCFFIHHRVAISLVDKKEFSAQNKMERSIDNEQVMIKSVCWKLITDRLGNIIKVIK

SEQ ID NO: 128 - protein, 1218 aa, Prevotella buccalis
MNKRILGLDTGTNSLGWAVVDWDEHAQSYELIKYGDVIFQEGVKIEKGIESSKAAERSGYKAIRKQYFRRRLRKIQVLKVLVKYHLCPYLSDDDLRQWHLQKQYPKSDELMLWQRTSDEEGKNPYYDRHRCLHEKLDLTVEADRYTLGRALYHLTQRRGFLSNRLDTSADNKEDGVVKSGISQLSTEMEEAGCEYLGDYFYKLYHEQGNKVRIRQRYTDRKKHYQHEFDAICEKQELSSELIEDLQRAIFFQLPLKSQRHGVGRCTFERGKPRCADSHPDYEEFRMLCFVNNIQVKGPHDLELRPLTYEEREKIEHLFFRKSKPNFDFEDIAKELAGKKNYAWIHDKEERAYKFNYRMTQGVPGCPTTAQLKSIFGDDWKTGIAETYTLIQKKNGSKSLQEMVDDVWNVLYSFSSVEKLKEFAHHKLQLDEENAEKFAKIKLSHSFAALSLKAIRKFLPFLRKGMYYTHASFFANIPTIVGKEIWNNEQSRKYIMENVGELVFNYQPKHRDVQGTIEMLIKDFLANNFELPAGATDKLYHPSMIETYPHALRNEFGILQLGSPRTNAIRNPMAMRSLHVLRRVVNQLLKESIIDENTEVHVEYARELNDANKRRAIADRQKEQDKQHKKYGDEIRKLYKEETGKDIEPTQTDVLKFQLWEEQNHYCLYTGEQIGITDFIGSNPKFDIEHTIPQSVGGDSTQMNLTLCDNRFNREVKKAKLPTELANHEEILTRIEPWKNKYEQLVKERDKQRTFAGMDKAVKDIRIQKRHKLQMEIDYWRGKYERFTMTEVPEGFSRRQGTGIGLISRYAGLYLKSLFHQADSRNKSNVYVVKGVATAEFRKMWGLQSEYEKKCRDNHSHHCMDAITIACIGKREYDLMAEYYHMEETFRQGRGSKPKFSKPWATFTEDVLNIYKNLLVVHDTPNNMPKHTKKYVQTSKGKVLAQGDTARGSLHLDTYYGAIERDGEIRYVVRRPLSSFTNPKELENIVDETVKRTIKEAIADKNFKQAIAEPIYMNEDKGILIKKVRCFANSVKQPINIRQHRDLSKKEYKQQYHVMNENNYLLAIYEGLVKNKVVREFEIVSYIEAAKYYKRSQDRNIFSSIVPTHSTKYGLPLKTKLLMGQQVLMFEENPDEIQVDNTKDLVKRLYKVVGIEKDGRIKFKHHQEARKEGLTIYSTPYKNNDDYVPIFRQSIKNINILVDGIDFNIDILGKVTLKE

SEQ ID NO: 129 - protein, 1218 aa, Prevotella timonensis
MNKRILGLDTGTNSLGWAVVDWDEHAQSYELIKYGDVIFQEGVKIEKGIESSKAAERSGYKAIRKQYFRRRLRKIQVLKVLVKYHLCPYLSDDDLRQWHLQKQYPKSDELMLWQRTSDEEGKNPYYDRHRCLHEKLDLTVEADRYTLGRALYHLTQRRGFLSNRLDTSADNKEDGVVKSGISQLSTEMEEAGCEYLGDYFYKLYDAQGNKVRIRQRYTDRNKHYQHEFDAICEKQELSSELIEDLQRAIFFQLPLKSQRHGVGRCTFERGKPRCADSHPDYEEFRMLCFVNNIQVKGPHDLELRPLTYEEREKIEPLFFRKSKPNFDFEDIAKALAGKKNYAWIHDKEERAYKFNYRMTQGVPGCPTIAQLKSIFGDDWKTGIAETYTLIQKKNGSKSLQEMVDDVWNVLYSFSSVEKLKEFAHHKLQLDEESAEKFAKIKLSHSFAALSLKAIRKFLPFLRKGMYYTHASFFANIPTIVGKEIWNKEQNRKYIMENVGELVFNYQPKHREVQGTIEMLIKDFLANNFELPAGATDKLYHPSMIETYPNAQRNEFGILQLGSPRTNAIRNPMAMRSLHILRRVVNQLLKESIIDENTEVHVEYARELNDANKRRAIADRQKEQDKQHKKYGDEIRKLYKEETGKDIEPTQTDVLKFQLWEEQNHHCLYTGEQIGITDFIGSNPKFDIEHTIPQSVGGDSTQMNLTLCDNRFNREVKKAKLPTELANHEEILTRIEPWKNKYEQLVKERDKQRTFAGMDKAVKDIRIQKRHKLQMEIDYWRGKYERFTMTEVPEGFSRRQGTGIGLISRYAGLYLKSLFHQADSRNKSNVYVVKGVATAEFRKMWGLQSEYEKKCRDNHSHHCMDAITIACIGKREYDLMAEYYRMEETFKQGRGSKPKFSKPWATFTEDVLNIYKNLLVVHDTPNNMPKHTKKYVQTSIGKVLAQGDTARGSLHLDTYYGAIERDGEIRYVVRRPLSSFTKPEELENIVDETVKRTIKEAIADKNFKQAIAEPIYMNEEKGILIKKVRCFAKSVKQPINIRQHRDLSKKEYKQQYHVMNENNYLLAIYEGLVKNKVVREFEIVSYIEAAKYYKRSQDRNIFSSIVPTHSTKYGLPLKTKLLMGQLVLMFEENPDEIQVDNTKDLVKRLYKVVGIEKDGRIKFKYHQEARKEGLPIFSTPYKNNDDYAPIFRQSINNINILVDGIDFTIDILGKVTLKE

SEQ ID NO: 130 - protein, 1487 aa, Prevotella timonensis
MKNILGLDLGSNSVGWALVKVEENGNPIGSIKMGSRIIPMSQDILGSFEKGDTVSQTAQRTLYRGKRRLIERHVLRRERLCRVLHIMNFLPAHFDRLLGWDKTDNKTYGKFIDDSEPKLAWRQNKNEMGKMEFVFMDSFHEMLSDFAKHQPQLIANGKKVPLDWTIYYLRKKALTQLISKEELAWILLNFNKKRGYYQLRGEEEEEQPTKKEEYKVLKVISVDADEGQKGNGIWYNIHLEDGGIYKKKSDIPLYDWVGKTLQLIVVTTYEKDGKTPKIFDSGKQNPSYRLPKEDDWGLVKKRTESQLQSSGKTVGAFIYDNILSKPDDKIRGNLVRTIERKYYKKELIEILQQQAKYHDELHNQNLLESCAKELYAHNDVHYNEVIKSNMINLLVNDIIFYQRPLKSKKSLIANCKYESYEYVDKETGEIKEMPIKCIAKSNPYYQEFRLWQFIHNLRLSDVVTREDVTAQYLSTPQDYCNLFTYLNDRKEIKQDILLKDFFKIKKVQIDKEKVFPIEWNYIKDATKSYPCNETRYELLSALKRAGMDKQWLDDTPNMQYRLWHLLYSVEEKEESAKALRKLYDDDKFVTSFLKIKPFNKCYGAYSEKAIKRLLTLMRMGKAWNEQAIDAKTLKCIQQIITDNVDSKLKEKIDDSRYVLHHVSDFQGLPTYLASYVIYGRHSEVTDIQCWDSPEDLLKFIRDFKQHSLRNPIVEQVILETLRVVYDIWKAEKHIDEIHVEVAREMKLTAQQRNEANLRNLNNEATNLRIKYLLEELKNDTFIKDVRPLSPIHQEKMRIYEQAVLGNLNKQDKDYDDIIKISKKEHPTNAELIRYKLWLEQRYCSPYTGKAISLSKLFTTAYEIEHIIPQSRYFDNSFNNKVICEAEVNKAKGNMLGYEFIKKQGGQKIYCTQLGKAVTILKEEAYKQFVNEHYAHNKRKRDNLLAENIPESFSSRQLNDTRYITKTIMSLLSNVVRQQSEEEATAKNLLPSSGSVTDRLKNDWGLKDVWNTIVTPRFERLNKLSGTNDFGEMKEENGNRYFQTNVPLEYEKGFKKKRIDHRHHAMDALVIACTTRNMVNYISNANANSPKQREDLRQLLCDKNRIINKPWDTFTQDALKALNDIVVSFKNNVRIINRATNRYQRYDKNGKKIIFSQKGDDMWAIRKSMHKETVFGRVNLIRKEVLPIAKALDNISAICNAQLRAYVNDLVDKHFNKKQLVAHFKSLNYKWNRQDVSKVEVWISSDNKTPMVAVRKPLDTSFDKKKIASITDTGIQTILLNYLESKGGDASVAFAPEGIQEMNSNIELYNNGKAHKPIKNVRLSEPLGAKYQVGERGAKTKKYVEADKGTNLFFAIYEDEEGKRYYYSVPLREAIERQKQKLSPVPEYNEKGVALKFYLSPNDLVYVPTEEERTMGTCHIDKARIYKMVSSTGCSCYFVPSTFAKVIVDKVELQSLNKMEKAITDECIKEVCWKLKVDRLGNIINVIK

SEQ ID NO: 131 - protein, 1138 aa, Bifidobacterium dentium
MLCRCHRRYRIGIDVGLMSVGLAAIEVDETGFPIRILNIQSVIHDGGIDPQLGKKKSISRKAISGVARRTRRMRRRKVVRLRQLDATLESLGFPIVEPDSLDTWEIWLTRAKLASSYIQDDETRKEDVSIALRHIARHRGWRNPYSNVESLFVDVAPSEQYEELRRKAEEKLGTSLSGNPTSAEIVECILKRQVGEVQLRTRSRKGVNGNAVEKEGLLPTKLMQSDNAAEIRRIFKVQRIDDETGRKLLRAVFKACSPKGSVERRVGRDALAPGLPRALKASLAFQEYRIANVLTNLVISEDGTKRKLTIAEKQRVFGFLSSNETDDITWIDVAEKLGLERRQIQGVGCLTADGEERISSTPPRNITALHIHSAKPVIREKLVAWWKAASPTVRETMVELLSNTVDIDRVREDMDYSSAVAFIDSLGDEELTALDSVDLLSGRAAYSRQTLKQLTERMLNTDDDLHEARKAVFGVDDNWKPPVDAISTSVGNPAVDRVLKIVNRYLLACQKRWRNPQSVQIEHVRESFSSVAKAKETERVQGERARYRNDLRRELCEQEGLNKIRESDIRRWESVQRQNGTCLYCGSPITFRTCEMDHIVPRKGVGSTNTRVNLAAACAACNKLKSNTAFSVWARTEGAANRKVSQRDAIERVKTFIFNKSVPPREQRAFKQAVISRLRQAESDPAIDNRSIESVAWMADELHRRIEAYFNQDADVSGNTPATQVWVFQGRVTALARKASGIEGRIHFAGEWKKTRLDRRHHAVDAAVIAMMNHSAAQTLVERDSLRLSQWITRKPETWKNYPFSEGQKKTRFKEWLDCMNALLDLLNDALDSDRVPVTRCQRMSLGNSQAHAATIRKMKRVELFSPMDADLIRRASTPALYCALTRLPEYSPEKGLPENRGREIVLNGRHIRSTETVDFFASGAAQLMVRNGSAEIGDSIHHMRIYRYRKTGAKSQEYVYGMIRVFQIDLLHASSENLFAVQLPSQSVSVRYGDKNVVQAIQEGRAEYLGHIVPNDEILISYEGVRMKDSEKIGAYANDFSGTASELAQRRHWVVVGSDVSKLALRPSYLSEEGLENSGSESERLSKQTRKVIEGKGWVVAVNILAKYHPVVIRRNALGEPRFRTNSGMPVSWRWDR

SEQ ID NO: 132 - protein, 587 aa, Neisseria subflava
MATSRSRIRSQTDAFGVVGSLVAFNQTSRLFVAKKNEGETADKELGALLKGVADNAHALQTGNFRTPAELALNKFEKESGHIRNQRGDYSHTFNRKDLQAELNLLFEKQKEFGNPHVSDGLKEGIETLLMAQRPALSGDAVQKMLGYCTFEPTEPKAAKNTYTAGRFIWLTKLNNLRILEQGSERPLTTTERATLMDEPYRKSKLTYAQARKLLGLEDTAFFKGLRYGKDNAEASTLMEMKAYHAISRALEKEGLKDKKSPLNLSPELQDEIGTAFSLFKTDEDITGRLKDRVQPEILEALLKHISFDKFVQISLKALRRIVPLMEQGKRYDEACAEIYGDHYGKKNAEEKIYLPPIPADEIRNPVVLRALSQARKVINAVVRRYGSPARIHIETAREVGKSFKDRKEIEKRQEENRKDREKAAAKFREYFPNFVGEPKSKDILKLRLYEQQHGKCLYSGKEINLGRLNEKGYIEIDHALPFSRTWDDSFNNKVLVLGSENQNKGNQTPYEYFNGKDNSREWQEFKARVETSRFPRSKKQRILLQKFDEDGIYRIGVKTALSFPKYQIDELGKEIRPCRLKKRPPVR

SEQ ID NO: 133 - protein, 1269 aa, Mycoplasma gallisepticum
MNNSIKSKPEVTIGLDLGVGSVGWAIVDNETNIIHHLGSRLFSQAKTAEDRRSFRGVRRLIRRRKYKLKRFVNLIWKYNSYFGFKNKEDILNNYQEQQKLHNTVLNLKSEALNAKIDPKALSWILHDYLKNRGHFYEDNRDFNVYPTKELAKYFDKYGYYKGIIDSKEDNDNKLEEELTKYKFSNKHWLEEVKKVLSNQTGLPEKFKEEYESLFSYVRNYSEGPGSINSVSPYGIYHLDEKEGKVVQKYNNIWDKTIGKCNIFPDEYRAPKNSPIAMIFNEINELSTIRSYSIYLTGWFINQEFKKAYLNKLLDLLIKTNGEKPIDARQFKKLREETIAESIGKETLKDVENEEKLEKEDHKWKLKGLKLNTNGKIQYNDLSSLAKFVHKLKQHLKLDFLLEDQYATLDKINFLQSLFVYLGKHLRYSNRVDSANLKEFSDSNKLFERILQKQKDGLFKLFEQTDKDDEKILAQTHSLSTKAMLLAITRMTNLDNDEDNQKNNDKGWNFEAIKNFDQKFIDITKKNNNLSLKQNKRYLDDRFINDAILSPGVKRILREATKVFNAILKQFSEEYDVTKVVIELARELSEEKELENTKNYKKLIKKNGDKISEGLKALGISEDEIKDILKSPTKSYKFLLWLQQDHIDPYSLKEIAFDDIFTKTEKFEIDHIIPYSISFDDSSSNKLLVLAESNQAKSNQTPYEFISSGNAGIKWEDYEAYCRKFKDGDSSLLDSTQRSKKFAKMMKTDTSSKYDIGFLARNLNDTRYATIVFRDALEDYANNHLVEDKPMFKVVCINGSVTSFLRKNFDDSSYAKKDRDKNIHHAVDASIISIFSNETKTLFNQLTQFADYKLFKNTDGSWKKIDPKTGVVTEVTDENWKQIRVRNQVSEIAKVIEKYIQDSNIERKARYSRKIENKTNISLFNDTVYSAKKVGYEDQIKRKNLKTLDIHESAKENKNSKVKRQFVYRKLVNVSLLNNDKLADLFAEKEDILMYRANPWVINLAEQIFNEYTENKKIKSQNVFEKYMLDLTKEFPEKFSEFLVKSMLRNKTAIIYDDKKNIVHRIKRLKMLSSELKENKLSNVIIRSKNQSGTKLSYQDTINSLALMIMRSIDPTAKKQYIRVPLNTLNLHLGDHDFDLHNMDAYLKKPKFVKYLKANEIGDEYKPWRVLTSGTLLIHKKDKKLMYISSFQNLNDVIEIKNLIETEYKENDDSDSKKKKKANRFLMTLSTILNDYILLDAKDNFDILGLSKNRIDEILNSKLGLDKIVK

SEQ ID NO: 134 - protein, 1354 aa, Prevotella melaninogenica
MADFAKYQPGMVADGRKIPLDWTLYYLRKKALTQAIRKEELAWILLNFNQKRGYYQLRGEEEEENSTKHEEYYELKVVSVEAAEEGKGGNTWYNVTLENGWIYRRQSKIELNDWVGKVRPFIVTTEYEIDGVTIKKDKNGEVKRSFRAPSENDWGLRKKRTESLLEESGKTVGAFIYNHILSEPADKIRGNFIRTIERKFYKKELEAILREQSKHQKELKDIDTLIACIKELYPNNKPHQDSLIKKDMTYLLITDLIFYQRPLKSKKSLIADCPYEYYEYVIKETGENKRQSIKCIAKSNPYYQEFRLWQFIINLRLFDRNNDKEVTSEYLSSMEDYTRLFTYLNDRKDINQETLLKDFFKQKKVKRGMEKEFPIRWNYIEDKEKKYPCNETRHELLTALGKVGIDHSWLDDKELFYRLWHLLYSVESKEEAEGALRKLVDNDDFVNAFLKIKPFKKEYGAYSEKAIKKLLAVMRMGNLWNEVDICEQTRDRIQNIIKGDIDEKIKDRMGRTFSQLSDFQGLPEWLACYVVYGQHSEATDIQRWTKPENLMAYINGFKQHSLRNPIVEQCILETLRTVHDIWKEAGHIDEIHIELGRGMKSTADQRARMSKSIMQNENTNLRIKSLLMELKNAKEFENVRPYSPMQQEILRIYEEGALQELTKEDAQYNEISKISQMAQPSANELLKYRLWLEQKYCSPYTGKPISLSKLFTSAYQIEHIIPQSRYFDDSFTNKVICEAEVNQLKSNMLGYEFIKKHGGEIVRCTMIGDVKLLDAKEYYNFVTEHYTNNRRKKEKLLMEDIPQEFLNRQMNDSRYISKKVMAILSNIVREEDEQEAKSKFVIACSGGITDRLKQDWGLNDVWNSIVYPRFERLNKLTNTENFGRWENKKGKQVFQTSVPLELQKDFSKKRIDHRHHAMDALVIACASNNIINYLNNESAKSQEKREDLRKKLCDKNRIIRKPWETFTQDAHTALENVVVSFKNYIRVINKATNYYEKYDKNGKKEIAEQKGQDMWAIRKPMHKETVFGQVNLRRKITIKLKDALEKIPAICDKELRDYINILVAKQFNKKQILAHFKSINYRLNMKSVDKVDVWQFSNEKEPMVATRKSVDTSFDTKRIATITDTGIQKILLNYLKAKNNDPNIAFTPEGIAEMNKHITEYNNGKQHQPILKVRVSEPKGAKYQVGETGNKRSKFVEAQKGTNLYFAIYEDKEGNRSYNTIPLNEVIERLKQGLSPVPDANEKSIPLKFHLSPNDLVYVPKTDEENEIKMGQIYKFVDSSGTTANFVPHRVSNLIYNVDKKIAENFCNHEIIQNEYGIGSPQSKNQKSITGEMIKAVCWKLEVDRLGNIHKIIK

SEQ ID NO: 135 - protein, 1130 aa, Streptococcus gallolyticus
MTNGKILGLDIGIASVGVGIIEAKTGKVVHANSRLFSAANAENNAERRGFRGSRRLNRRKKHRVKRVRDLFEKYEIVTDFRNLNLNPYELRVKGLTEQLTNEELFAALRTISKRRGISYLDDAEDDSTGSTDYAKSIDENRRLLKTKTPGQIQLERLEKYGQLRGNFTVYDENGEAHRLINVFSTSDYEKEARKILETQADYNKKITAEFIDDYVEILTQKRKYYHGPGNEKSRTDYGRFRTDGTTLENIFGILIGKCSFYPDEYRASKASYTAQEYNFLNDLNNLKVPTETGKLSTEQKEALVEFAKSTATLGPAKLLKEIAKILDCKVDEIKGYREDDKGKPDLHTFEPYRKLKFNLDSVNIDDLSREVLDKLADILTLNTEREGIEDAIRHNLPNQFTEGQISEIIKVRKSQSTAFNKGWHSFSAKLMNELIPELYATSDEQMTILTRLEKFKVNKKSSKNTKTIDEKEVTDEIYNPVVAKSVRQTIKIINAAVKKYGDFDKIVIEMPRDKNADDEKKFIDKRNKENKKEKDDALKRAAYLYNGTDKLPDEVFHGNKQLETKIRLWYQQGERCLYSGKPIPIQELVHNSNNFEIDHILPLSLSFDDSLANKVLVYAWTNQEKGQKTPYQVIDSMDAAWSFREMKDYVLKQKGLGKKKRDYLLTTENIDKIEVKKKFIERNLVDTRYASRVVLNSLQSALRELGKDTKISVIRGQFTSQLRRKWKIDKSRETYHHHAVDALIIAASSQLKLWEKQDNPMFVDYGNNQVVDKQTGEILSVSDDEYKELVFQPPYQGFVNMISSKGFEDEILFSYQVDSKYNRKVSDATIYSTRKAKIGKDKKEETYVLGKIKDIYSQNGFDTFIKKYNKDKTQFLMYQKDPLTWENVIEVILRDYPTTKKSEDGKNDVKCNPFEEYRRENGLVCKYSKKGKGTPIKSLKYYDKKLGNCIDITPEGSKNEVVLQSLNPWRADVYFNPETLKYELLGLKYSDLSFEKGTGKYHISQEKYDVIKEKEGIGKKSEFKFTLYRNDLILIKDTASGEQEIYRFLSRTMPNVKHYAELKPYDKEKFDNVQELVEALGEADKVGRCIKGLNKSNLSIYKVRTDVLGNKYFVKKEGDKPKLDFKNNKK

SEQ ID NO: 136 - protein, 1371 aa, Streptococcus gallolyticus
MTEKNYSIGLDIGTNSVGWAVITDDYKVPAKKMKVLGNTDKKYIKKNLLGALLFDNGETAEATRLKRTARRRYTRRKNRLRYLQEIFAEEMAKVDESFFYRLDESFLTTDDKDFERHPIFGNKADEIKYHQEFPTIYHLRKHLADSHEKADLRLIYLALAHMIKFRGHFLIEGELNAENTDVQKLFEAFVEVYDRTFDDSNLSEITVDASSILTEKFSKSRRLENLIKHYPTEKKNTLFGNLVALALGLQPNFKTSFKLSEDAKLQFSKDTYEEDLEELIGKIGDEYADLFTSAKNLYDAILLSGILTVADNTTKAPLSASMIKRYNEHQVDLKKLKEFIKNNASDKYDEIFNDKDKNGYAGYIENGVKQDEFYKYLKTTLSKIDGSDYFLDKIEREDFLRKQRTFDNGSIPHQIHLQEMHAILRRQGEHYAFLKENQAKIEKILTFRIPYYVGPLARKNSRFAWAEYHSDEKITPWNFDEIIDKEKSAEKFITRMTLNDLYLPEEKVLPKHSLVYETYTVYNELTKVKYVNEQGKSNFFDANMKQEIFEHVFKENRKVTKDKFLNYLNKEFPEYRIQDLIGLDKENKSFNASLGTYHDLKKILDKSFLDDKTNETIIEDIIQTLTLFEDRDMIRQRLQKYSDIFTPQQLKKLERRHYTGWGRLSYKLINGIRNKENGKSILDYLIDDGYANRNFMQLISDDTLPFKQIIKDAQIIGDIDDVTSVVRELPGSPAIKKGILQSVKIVDELVKVMGHNPDNIVIEMARENQTTNRGRNQSQQRLKKLQDSLKELGSNILNEEKPSYIEGKVENNHLQDDRLFLYYIQNGKDMYTGDELDIDHLSDYDIDHIIPQAFIKDDSIDNRVLTSSAKNRGKSDDVPSLDIVHDRKADWIRLYKSGLISKRKFDNLTKAERGGLTENDKAGFIKRQLVETRQITKHVAQILDSRFNTERDENDKVIRNVKVITLKSNLVSQFRKDFKFYKVREINDYHHAHDAYLNAVVGTALLKKYPKLAPEFVYGEYKKYDIRKFITSSGDKATAKYFFYSNLMNFFKRVIRYSNGKVVVRPVIECSKDTGEIAWNKQTDFEKVRRVLSYPQVNIVKKVETQTGGFSKESILPKGNSDKLIPRKTKKFRWDTPKYGGFDSPNIAYSVFVIADVEKGKAKKLKTVKELVGISIMERSSFEENPVVFLEKKGYQNVQEDNLIKLPKYSLFEFEGGRRRLLASASELQKGNEVVLSRHLVELLYHAHRVNSFNNSEHLKYVSEHKKEFGEVLSCVENFAKSYVDVEKNLGKIRAVADKIDTFSIEDISISFVNLLTLTALGAPADFNFLGEKIPRKRYTSTKECLNATLIHQSITGLYETRIDLSKLGEE

SEQ ID NO: 137 - protein, 1168 aa, Azospirillum sp.
MARPAFRAPRREHVNGWTPDPHRISKPFFILVSWHLLSRVVIDSSSGCFPGTSRDHTDKFAEWECAVQPYRLSFDLGTNSIGWGLLNLDRQGKPREIRALGSRIFSDGRDPQDKASLAVARRLARQMRRRRDRYLTRRTRLMGALVRFGLMPADPAARKRLEVAVDPYLARERATRERLEPFEIGRALFHLNQRRGYKPVRTATKPDEEAGKVKEAVERLEAAIAAAGAPTLGAWFAWRKTRGETLRARLAGKGKEAAYPFYPARRMLEAEFDTLWAEQARHHPDLLTAEAREILRHRIFHQRPLKPPPVGRCTLYPDDGRAPRALPSAQRLRLFQELASLRVIHLDLSERPLTPAERDRIVAFVQGRPPKAGRKPGKVQKSVPFEKLRGLLELPPGTGFSLESDKRPELLGDETGARIAPAFGPGWTALPLEEQDALVELLLTEAEPERAIAALTARWALDEATAAKLAGATLPDFHGRYGRRAVAELLPVLERETRGDPDGRVRPIRLDEAVKLLRGGKDHSDFSREGALLDALPYYGAVLERHVAFGTGNPADPEEKRVGRVANPTVHIALNQLRHLVNAILARHGRPEEIVIELARDLKRSAEDRRREDKRQADNQKRNEERKRLILSLGERPTPRNLLKLRLWEEQGPVENRRCPYSGETISMRMLLSEQVDIDHILPFSVSLDDSAANKVVCLREANRIKRNRSPWEAFGHDSERWAGILARAEALPKNKRWRFAPDALEKLEGEGGLRARHLNDTRHLSRLAVEYLRCVCPKVRVSPGRLTALLRRRWGIDAILAEADGPPPEVPAETLDPSPAEKNRADHRHHALDAVVIGCIDRSMVQRVQLAAASAEREAAAREDNIRRVLEGFKEEPWDGFRAELERRARTIVVSHRPEHGIGGALHKETAYGPVDPPEEGFNLVVRKPIDGLSKDEINSVRDPRLRRALIDRLAIRRRDANDPATALAKAAEDLAAQPASRGIRRVRVLKKESNPIRVEHGGNPSGPRSGGPFHKLLLAGEVHHVDVALRADGRRWVGHWVTLFEAHGGRGADGAAAPPRLGDGERFLMRLHKGDCLKLEHKGRVRVMQVVKLEPSSNSVVVVEPHQVKTDRSKHVKISCDQLRARGARRVTVDPLGRVRVHAPGARVGIGGDAGRTAMEPAEDIS

SEQ ID NO: 138 - protein, 1345 aa, Streptococcus mutans
MKKPYSIGLDIGTNSVGWAVVTDDYKVPAKKMKVLGNTDKSHIKKNLLGALLFDSGNTAADRRLKRTARRRYTRRRNRILYLQEIFAEEMSKVDDSFFHRLEDSFLVTEDKRGERHPIFGNLEEEVKYHENFPTIYHLRQYLADNPEKVDLRLVYLALAHIIKFRGHFLIEGKFDTRNNDVQRLFQEFLAVYDNTFENSSLQEQNVQVEEILTDKISKSAKKDRVLKLFPNEKSNGRFAEFLKLIVGNQADFKKHFELEEKAPLQFSKDTYEEELEVLLAQIGDNYAELFLSAKKLYDSILLSGILTVTDVSTKAPLSASMIQRYNEHQMDLAQLKQFIRQKLSDKYNEVFSDVSKDGYAGYIDGKTNQEAFYKYLKGLLNKIEGSGYFLDKIEREDFLRKQRTFDNGSIPHQIHLQEMRAIIRRQAEFYPFLADNQDRIEKILTFRIPYYVGPLARGKSDFAWLSRKSADKITPWNFDEIVDKESSAEAFINRMTNYDLYLPNQKVLPKHSLLYEKFTVYNELTKVKYKTEQGKTAFFDANMKQEIFDGVFKVYRKVTKDKLMDFLEKEFDEFRIVDLTGLDKENKAFNASYGTYHDLRKILDKDFLDNSKNEKILEDIVLTLTLFEDREMIRKRLENYSDLLTKEQVKKLERRHYTGWGRLSAELIHGIRNKESRKTILDYLIDDGNSNRNFMQLINDDALSFKEEIAKAQVIGETDNLNQVVSDIAGSPAIKKGILQSLKIVDELVKIMGHQPENIVVEMARENQFTNQGRRNSQQRLKGLTDSIKEFGSQILKEHPVKHSQLQNDRLFLYYLQNGRDMYTGEELDIDYLSQYDIDHIIPQAFIKDNSIDNRVLTSSKENRGKSDDVPSKNVVRKMKSYWSKLLSAKLITQRKFDNLTKAERGGLTDDDKAGFIKRQLVETRQITKHVARILDERFHTETDENNKKIRQVKIVTLKSNLVSNFRKEFELYKVREINDYHHAHDAYLNAVIGKALLGVYPQLEPEFVYGDYPHFHGHKENKATAKKFFYSNIMNFFKKDDVRTDKNGEIIWKKDEHISNIKKVLSYPQVNIVKKVEEQTGGFSKESILPKGNSDKLIPRKTKKFYWDTKKYGGFDSPIVAYSILVIADIEKGKSKKLKTVKALVGVTIMEKMTFERDPVAFLERKGYRNVQEENIIKLPKYSLFKLENGRKRLLASARELQKGNEIVLPNHLGTLLYHAKNIHKVDEPKHLDYVDKHKDEFKELLDVVSNFSKKYTLAEGNLEKIKELYAQNNGEDLKELASSFINLLTFTAIGAPATFKFFDKNIDRKRYTSTTEILNATLIHQSITGLYETRIDLSKLGGD

SEQ ID NO: 139 - protein, 1024 aa, Helicobacter mustelae
MIRTLGIDIGIASIGWAVIEGEYTDKGLENKEIVASGVRVFTKAENPKNKESLALPRTLARSARRRNARKKGRIQQVKHYLSKALGLDLECFVQGEKLATLFQTSKDFLSPWELRERALYRVLDKEELARVILHIAKRRGYDDITYGVEDNDSGKIKKAIAENSKRIKEEQCKTIGEMMYKLYFQKSLNVRNKKESYNRCVGRSELREELKTIFQIQQELKSPWVNEELIYKLLGNPDAQSKQEREGLIFYQRPLKGFGDKIGKCSHIKKGENSPYRACKHAPSAEEFVALTKSINFLKNLTNRHGLCFSQEDMCVYLGKILQEAQKNEKGLTYSKLKLLLDLPSDFEFLGLDYSGKNPEKAVFLSLPSTFKLNKITQDRKTQDKIANILGANKDWEAILKELESLQLSKEQIQTIKDAKLNFSKHINLSLEALYHLLPLMREGKRYDEGVEILQERGIFSKPQPKNRQLLPPLSELAKEESYFDIPNPVLRRALSEFRKVVNALLEKYGGFHYFHIELTRDVCKAKSARMQLEKINKKNKSENDAASQLLEVLGLPNTYNNRLKCKLWKQQEEYCLYSGEKITIDHLKDQRALQIDHAFPLSRSLDDSQSNKVLCLTSSNQEKSNKTPYEWLGSDEKKWDMYVGRVYSSNFSPSKKRKLTQKNFKERNEEDFLARNLVDTGYIGRVTKEYIKHSLSFLPLPDGKKEHIRIISGSMTSTMRSFWGVQEKNRDHHLHHAQDAIIIACIEPSMIQKYTTYLKDKETHRLKSHQKAQILREGDHKLSLRWPMSNFKDKIQESIQNIIPSHHVSHKVTGELHQETVRTKEFYYQAFGGEEGVKKALKFGKIREINQGIVDNGAMVRVDIFKSKDKGKFYAVPIYTYDFAIGKLPNKAIVQGKKNGIIKDWLEMDENYEFCFSLFKNDCIKIQTKEMQEAVLAIYKSTNSAKATIELEHLSKYALKNEDEEKMFTDTDKEKNKTMTRESCGIQGLKVFQKVKLSVLGEVLEHKPRNRQNIALKTTPKHV

SEQ ID NO: 140 - protein, 765 aa, Butyrivibrio fibrisolvens
MGITIGLDLGVASVGWAVVNDDYEILESCSNIFPSADASKNSERRGFRQGRRLTRRRKNRIHDFQKLWEDKGFVIPSQGTEDVLAIKIKGLSEKLSVDEVYWVLLNSLKHRGISYLDDADSGDNSSDYAKSISRNEEELKEKLPCEIQWERLQKYGAYRGNISIVEDGEPITLRNVFTTSAYKKEVEQFIDTQAKYNAQYSGDFKADYLEIFNRKREYYEGPGNELSRTDYGKYTTEINADGEYITVDNIFDKLVGKCSVNPDERRAAGASYTAQEFNVLNDLNNLTISSESSFIEDGKLTEDAKRKIIETIKNAKTVNVKKIICDVIGDKKCQISGARIDKNEKEIFHSFEAYNKMRRALEEIGFDISSLSRENLDLIGDILTLNTDRESILNAFNRKGIELADEAKDILVKVRKTNGSLFNKWQSFGLSIMNELIPELYAQPKNQMELLTAMGVFKSRGDRFLECKEIPGDLIVDDIYNPVVSKTVRITVRILNALIKKYGYPDRVVIEMPRDKNSDEEQQRLKKEQRDNENEIKDIKARVKTEYGREITEEDFRQHSKLSLKLKLWNEQQGICPYSGKSIKIDDLLDNPNLFEVDHIIPLSISFDDSRNNKVLVYSSENQDKGNRTPLAYLASVNRQWDIHSFMDYVLKTYAGAQKRKKRDNLLNEQDITKVEVLQGFVNRNINDTRYASKVVLNSLQEYFSSKECSTKVKVIRGSFTHQMRVNLKLKKTVMNHMFIMQLMQCLLLFHRWDMTLIMNLQISI

SEQ ID NO: 141 - protein, 1338 aa, Coprococcus catus
MKQEYFLGLDMGTGSLGWAVTDSTYQVMRKHGKALWGTRLFESASTAEERRMFRTARRRLDRRNWRIQVLQEIFSEEISKVDPGFFLRMKESKYYPEDKRDAEGNCPELPYALFVDDNYTDKNYHKDYPTIYHLRKMLMETTEIPDIRLVYLVLHHMMKHRGHFLLSGDISQIKEFKSTFEQLIQNIQDEELEWHISLDDAAIQFVEHVLKDRNLTRSTKKSRLIKQLNAKSACEKAILNLLSGGTVKLSDIFNNKELDESERPKVSFADSGYDDYIGIVEAELAEQYYIIASAKAVYDWSVLVEILGNSVSISEAKIKVYQKHQADLKTLKKIVRQYMTKEDYKRVFVDTEEKLNNYSAYIGMTKKNGKKVDLKSKQCTQADFYDFLKKNVIKVIDHKEITQEIESEIEKENFLPKQVTKDNGVIPYQVHDYELKKILDNLGTRMPFIKENAEKIQQLFEFRIPYYVGPLNRVDDGKDGKFTWSVRKSDARIYPWNFTEVIDVEASAEKFIRRMTNKCTYLVGEDVLPKDSLVYSKFMVLNELNNLRLNGEKISVELKQRIYEELFCKYRKVTRKKLERYLVIEGIAKKGVEITGIDGDFKASLTAYHDFKERLTDVQLSQRAKEAIVLNVVLFGDDKKLLKQRLSKMYPNLTTGQLKGICSLSYQGWGRLSKTFLEEITVPAPGTGEVWNIMTALWQTNDNLMQLLSRNYGFTNEVEEFNTLKKETDLSYKTVDELYVSPAVKRQIWQTLKVVKEIQKVMGNAPKRVFVEMAREKQEGKRSDSRKKQLVELYRACKNEERDWITELNAQSDQQLRSDKLFLYYIQKGRCMYSGETIQLDELWDNTKYDIDHIYPQSKTMDDSLNNRVLVKKNYNAIKSDTYPLSLDIQKKMMSFWKMLQQQGFITKEKYVRLVRSDELSADELAGFIERQIVETRQSTKAVATILKEALPDTEIVYVKAGNVSNFRQTYELLKVREMNDLHHAKDAYLNIVVGNAYFVKFTKNAAWFIRNNPGRSYNLKRMFEFDIERSGEIAWKAGNKGSIVTVKKVMQKNNILVTRKAYEVKGGLFDQQIMKKGKGQVPIKGNDERLADIEKYGGYNKAAGTYFMLVKSLDKKGKEIRTIEFVPLYLKNQIEINHESAIQYLAQERGLNSPEILLSKIKIDTLFKVDGFKMWLSGRTGNQLIFKGANQLILSHQEAAILKGVVKYVNRKNENKDAKLSERDGMTEEKLLQLYDTFLDKLSNTVYSIRLSAQIKTLTEKRAKFIGLSNEDQCIVLNEILHMFQCQSGSANLKLIGGPGSAGILVMNNNITACKQISVINQSPTGIYEKEIDLIKL

SEQ ID NO: 142 - protein, 1035 aa, Candidatus Puniceispirillum
MRRLGLDLGTNSIGWCLLDLGDDGEPVSIFRTGARIFSDGRDPKSLGSLKATRREARLTRRRRDRFIQRQKNLINALVKYGLMPADEIQRQALAYKDPYPIRKKALDEAIDPYEMGRAIFHINQRRGFKSNRKSADNEAGVVKQSIADLEMKLGEAGARTIGEFLADRQATNDTVRARRLSGTNALYEFYPDRYMLEQEFDTLWAKQAAFNPSLYIEAARERLKEIVFFQRKLKPQEVGRCIFLSDEDRISKALPSFQRFRIYQELSNLAWIDHDGVAHRITASLALRDHLFDELEHKKKLTFKAMRAILRKQGVVDYPVGFNLESDNRDHLIGNLTSCIMRDAKKMIGSAWDRLDEEEQDSFILMLQDDQKGDDEVRSILTQQYGLSDDVAEDCLDVRLPDGHGSLSKKAIDRILPVLRDQGLIYYDAVKEAGLGEANLYDPYAALSDKLDYYGKALAGHVMGASGKFEDSDEKRYGTISNPTVHIALNQVRAVVNELIRLHGKPDEVVIEIGRDLPMGADGKRELERFQKEGRAKNERARDELKKLGHIDSRESRQKFQLWEQLAKEPVDRCCPFTGKMMSISDLFSDKVEIEHLLPFSLTLDDSMANKTVCFRQANRDKGNRAPFDAFGNSPAGYDWQEILGRSQNLPYAKRWRFLPDAMKRFEADGGFLERQLNDTRYISRYTTEYISTIIPKNKIWVVTGRLTSLLRGFWGLNSILRGHNTDDGTPAKKSRDDHRHHAIDAIVVGMTSRGLLQKVSKAARRSEDLDLTRLFEGRIDPWDGFRDEVKKHIDAIIVSHRPRKKSQGALHNDTAYGIVEHAENGASTVVHRVPITSLGKQSDIEKVRDPLIKSALLNETAGLSGKSFENAVQKWCADNSIKSLRIVETVSIIPITDKEGVAYKGYKGDGNAYMDIYQDPTSSKWKGEIVSRFDANQKGFIPSWQSQFPTARLIMRLRINDLLKLQDGEIEEIYRVQRLSGSKILMAPHTEANVDARDRDKNDTFKLTSKSPGKLQSASARKVHISPTGLIREG

SEQ ID NO: 143 - protein, 1270 aa, Mycoplasma gallisepticum
MNNSIKSKPEVTIGLDLGVGSVGWAIVDNETNIIHHLGSRLFSQAKTAEDRRSFRGVRRLIRRRKYKLKRFVNLIWKYNSYFGFKNKEDILNNYQEQQKLHNTVLNLKLEALNAKIDPKALSWILHDYLKNRGHFYEDNRDFNVYPTEELANYFDEFGYYKGIIDSKNDDDDKLEEGLTKYKFSNQHWLEEVKKVLSNQTGLPEKFKEEYESLFSYVRNYSEGPGSINSVSPYGIYHLDEKEGKVVQKYNNIWDKTIGKCSIFPDEYRAPKNSPIAMIFNEINELSTIRSYSIYLTGWFINQEFKKAYLNKLLDLLIKTNSEKPIDARQFKKLREETIAESIGKETLKDVESEEKLEKDDHKWKLKGLKLNTNGKIQYNDLSSLAKFVHKLKQHLKLDFLLEDQYTPLDKINFLQSLYVYLGKHLRYSNRVDSANLKEFSDSSRLFERVLQEQKDGLFKLFEQTDKDDEKILTQTHSLSTKAMLLAITRMTNLDNDEDNQKNNDKGWNFEAIKNFDQKFIDITKTNNNLSLKQDKRYLDDQFINDAILSPGVKRILREATKVFNAILKQFSEEYDVTKVVIELARELSEEKELENTKNYKKLIKKNGDKISEGLKALGIAEDKIEEILKSPTKSYKVLLWLQQDHIDPYSQKEIAFDDILTKTEKTEIDHIIPYSISFDDSSSNKLLVLAESNQAKSNQTPYEFINSGKAEITWEVYEAYCHKFKNGDSSLLDSTQRSKKFAKMMKTDTSSKYDIGFLARNLNDTRYATIVFRDALKDYANNHLVEDKPMFKVVCINGGVTSFLRKNFDPKSWYAKKDRDKNIHHAVDASIISIFSNETKTLFNQLTKFADYKLFKNTDGSWKKIDPKTGVVSEVTDENWKQIRVRNQVSEIAKVIDKYIQDSNIERKARYSRKIENKTNISLFNDTVYSAKKVGYEDQIKRKNLKTLDIHESAEENKNSKVKKQFVYRKLVNVSLLNNDKLADLFAEKEDILMYRANPWVINLAEQIFNEYTENKKIKSQNVFEKYMLDLTKEFPEKFSEAFVKSMIRNKTAIIYNVEKDVVHRIKRLKILSSELKENKWSNVIIRSKNESGTKLSYQDTINSIALMIMRSIDPTAKKQYIRVPLNTLNLHLGDQDFDLHNIDAYLKKPKFVKYLKANEIGDEYKPWRVLTSGTLLIHKKDKKLMYISSFQNLNDLIEIKNLIETEYKENVDSDPKKKKKASQILRSLSVILNDYILLDAKYNFDILGLSKNKIDEILNSKLDLDKIAK

SEQ ID NO: 144 - protein, 1204 aa, Prevotella ruminicola
MERILGIDTGTNSLGWAIVDKDENQYHLVAKGTNIFSEGVKIEKGIESSKAAERTEHRSVRKHYWRRKIRKIRLLTILSDNDLCPRLKHEQLRQWRLKKVYPTDDTFMEWQRTEDKAQVNPYKFRYICLTQKLDLSDITQRFILGRALYHLNQRRGFLSNRKEATKESEGTVKEGISSLSKDMKDSGCEYLGEYFYQLYQQGKKIRNHYTARKEHYLKEFKAICSKQELDDALIEKLEKAIFDQRPLKSQKGQVGTCTFEKGKSRCPSSHPLYEDFRMYSFINNIKVQVDTLYDKGERSLTDEEKQLIIPLFKRKSKRTFPFEDIAKKIAGKNNYCYIKSNEEKAYKFNYQMDTQVSGSPVNAQLEEIFGEDWLSSVCEVYTLANNKSRFQIMNDVWHVLFFYDDEDKLKEFAKDRLQLDDELAEKFSKISIPNDYAALSLKAIRKIMPYLRDYGLIYSEAVFLANLVDVLPQHVWGIKEMREAAIENVIDVMHSYDKNNIDGITLEGCVKTFLKERYQVSDDNLKKLYHPSMLDPYPRQRPNDEGVFQLGSPRISSVKNPMAMHSLFRLRKVVNLMLKKGYITPDTKVHIEFSRDLNDANKRWAIQTWQRENEKERERCRKEIEKYIASPSDTDILKYQLWEEQNHKCLYTGDEIRITDFLGDNPKYDIEHTIPRSAGGDSTKMNLTLCSSRFNRDEKKTKLPAELVNHDEILERISNWKEKYEDIDKQIRKISTKGATSKEDKDSKIRRRHYLILQRDYWRGKYQRFTMTEVPEGFSRRQGTDISVISRYARMYLKSVFKQVYIVKGIATSDFRKMWGIQDEYAKKERVNHVHHCIDAITIACIGKAEYDKLADYRHQYDDYLFQGKTKPTFDKPWPSFVIDIKHIQDELLIAHYAKDNLEKFTKKNLRGKDGRIIRDKFGNKLQMKGDTSRNSLHNDKFYGAINHEGEIKYVYRTNIEALDAKSIGNIVDPTVRSIIESAIAIHGSLKAAINKGIWMNEEKHIPIKKVRVFRNDVKKPIELKDQRDLSDKDYKQHYYVTNDGNYMMLIFSKLNNKGREIRQHVVINSLEATEVIKSHKRSQVGKVVWESYYSKEGFDLIYKLKSGTMILLYENNRDEVWDLDIRNLQKRLYIITKMKYDGRIYMMHHQEAREKKDLEEKSGSFKINEDYRPLIVNSYNQFNALVQDLDFEINDLGEIRRLI

SEQ ID NO: 145 - protein, 1178 aa, Scardovia inopinata
MGKRHNSNMAKKKISYRIGIDVGLNSTGLAAIEVDDDGAPIRILNTMSVIHDGGVDPDAAKVRGTRLAISGIARRTRRMRRRRAKRLDRLEQILEKYGYTDTEPVLEEPYGPWICRAELADGFINDDEQRRMMIGIAIRHIARHRGWRNPYQNVRALLNIDDSDLSEEYKNLKEKVQDQINDGKDLPNFTPSQLVRDYLDNFSGQPAARIRTGKAGPRGNRRDAVGILPQRMRQSDYAYELQRIFDMQKIGRDEAQELLMAVFEAKSPKGSAEKRIGKDPLTGKKRALKASLAFQKYRIVATITNLRIKTGTGSERMLSPTELNDIYTYLLRVQDDNHLPTWEDICEEVLHIGRYQLAGIGKTFEGGERISNMPPVIQTSLAIHGLSEGTLAEKLTKWWDKADDDSRESMIKLLSNTVDIDRVNEVDENFASALDFIDSLDDEELTKLDKIALPRGRAAYSEEALNKLTADMLNTGDDLFSARQRIYHVNNSWRPPQPPIGEPLGNPAVDRVLKITNRYLMNCLNRWGQPRRVTIEHTRSGFTSVKQATEHQKISDKRAEYRRDIVKQLEEAGVESVHEYDIRRWEAVQRQNGQCLYCGRDITFKTCEMDHIVPRKGPGSTNTRTNFAAVCPECNRMKSNIPFASWAETKEAKDRGVSLDKAIKQVRFFNFTKNEYSPQAQRNFKKSMIERLKQKTSDEPLDNRSIESVSWMADELYKRIDWYFNHEQYETSKKAINDDKDNLSGTQVVVYPGSITAEARNAAGLGGNIHFIGGRYKTRLDRRHHAVDACVIAMMEPGIARILTERNQLRQAQRLTARIEDDEVNWKDYPTENTAGYNKYQAWSDRMHALLEYMNNALDYDKIPVVRWERLQLGNRSAHEDTIHPLKKLPLSHEISAIDINHASTPALYEALVSLPDFSEQDGLPADPSRQINVNGERYSGDDLVSFFNSNAAQIAIQGGSAELGTAFHHARIYRCWTVGKNGKKKIFFGMIRVYQHDLLHAKNEDLFTYPLKRSSVSMRYAKKEVVHAILSGNAEYVGYLCVGDELVLDLKGDKSNDEGGSRLSGQVGEFVQKFEEDSKVNSQIVNRWTVDGFPDEAKLRLRPSMFAGEGLKNMKSELVENAAIKNILSKTGWRVSVDVISKKSPVVLRRNAFGEPRWKTNAGLPVSYRWQDTETKE

SEQ ID NO: 146 - protein, 1371 aa, Gordonibacter pamelaeae
MNLRNVESYQVGLDIGTGSVGWAVLDDNGDLCRFKGKPTWGSRVFPTAETAAEARVHRGQRRRYDRRRQRIDLLQRFFADEVAKVDPEFFIRLNQARLHPENRDPAHADYRWPLFNGSNFTEKDYYRQFPTIYHLRAHLLKSDEPADIRLVYLALHNIVKHRGNFLHQDNPSLSARNANVGDAVEALCLALDEWCGAHDVECACDEAALAEALGDASLRPGEKRERAEAALGVEKAHKKLAKAVSSAVVGYAAEFGHVFFAESEGSKFALSNDEKVEAYVCPDEGRDLFDAMRAVHSSYVLMGILSEAQGELLSVCKVGEYERYKRDLETLKSLVRAYGPERYDEFFCGPFYEGTRDYDPGKAQGYTKYNLGASKLSHEDFLKEVQKLLKDIGAQADERYADIERAIEAGAFLRRLKTSDNGTIPYQLHLEEMDAIIERQAAFYPFLAQEKDKLKSLVSFRIPYYVGPLTQKNAARDGKGEARFAWSSRKPGMEDARVYPWNWEDVIDKDQSAEDFIRRMTGTCTYLKGEPVLARCSLDYELFCVLNELAGARWTQDGDKSYRFDAADRLGIVEDLFKKRKRVTYEAAEKWLARTHGPESGKSAGGAYHVSGGQGEDAFESQLSSHYDFCKILGVDELSDADEAMAEDIILWNTVFEDRSILKRKIKLAYGDRLGDAQVRKLCQKRYTGWGRLSGELLRGLRSATDNGPKTIMDILLEGDPNHARRMGAAMNLMEILHDDLLEFQAKIDEHNRERALAVGGMSVDEVTGSPALRRGINQALRVVDEIAGIAGKPPAHIYVEVTRDEGARNKGRRTTSRYRALEAALSSIKAQCADVYAELKERDPRALDDERLTLYFMQCGKCMYSGDALDINKLQTYQVDHILPQSYVKDDSFENKVLVRPDTNQRKGDTLLLDERLIARMRGFWRTLRDAELIGEKKFNNLTRTSVSDEQMKKFVSRQLVETGQMVKQVQQLLQARYPESEVQPVKAGVSHQLRVGCALAKSREINDFHHAHDAYLACQVGRFVQYRHSAVYSEPVKMAAVVKQFIKKQAEDYRRTRELPGSDGFIVSSFMTPGFDVKTGEVFRDAWDAGAEIDRIRRCFDYKDCFISRMPEETHGAFWDATIYSPRAAGKTLSLPLKRGLDPRKYGSYSREQFAYFFVYEAVKPKKKQRVLEFAPVPVRVASALANDPDALEDYARELAEAEGLVFERIRRRKVYKYQQIIVGDSRLYVTGREEVRNARQLAFSQDETKLICRIEQGEECEEGELLDLFRSMQRKYLACAPRLARLMKVAEMEEGFIAATASGKREVLLSLTSIAAAHRNSIDLKPIGRKGSSGQMKITFSKELSTNGILFVDSSVTGMFERRCRLGL

SEQ ID NO: 147 - protein, 1388 aa, Zunongwangia profunda
MKRILGLDLGTNSIGWALVNEAENEKEISKIIKLGVRVNPLTIDEKTNFEKGRPLSTNADRTLKRGARRNLQRYKLRRENLIEILIDNHIITKETPLTEIGKGTTYQTLSLRAKAVRERIDLEDFAKVLLAINKKRGYKSSRKASNDEEGQAIDGMAIAKELYERGITPGQYVLELLENDRKYIPDFYRSDLKQEFNKIWNNQKTFYPEILTDELFKELDGKNKSQTWAICQKPFNIKGIKRITKGREKTIENYHWRVKGLSGKLNLEKLAIILQEINNDINQSSGYLGGISDKSKKLYLNKETVGEFLYKQIAKNPHTSLKNQVFYRHDYLDEFEQIWKTQSNFNANLTDELKQEIRDVIIFYQRKIKSQKSLISFCQFESWEQEYFDKETGKTKTRTVGRRVIPKSSPLFQEFKIWQNLNHLVFTNSETDEKIEIKEVEQEIRKELFEELNLRGDLNPNDLLKILRSQFKIGKLSNWKCNFEKIEGNRTNAALFNIYQKISDFEGYGIDWNKSNAKKIRKELKATFPEIGIDASILEFDAYKKQLTNQSSYELWHLLYSAEEDFKISEQDKLIYGNSSVSLKKKLHLKFGFNPEYAKMLANLSLMSDYGNLSAKAIKKILPYLEDGHLYSEACRLAGYNHSKSLTAEELEKFEPKAKLDLLKKNSLRNPVVEKILNQMVNVVNQVIDTYGKPDGVRIELARELKKSAKERAEMTKGIADGTRRNEEIKKIITQKFGIPNPTKSDLVRYRLWQELESRGYKDIFTDKYISPDKIFSSEIDIEHIIPKALLFDDSFSNKTLSFRNVNLKKANRTALDFITQDYQSNVEAYKERVETWNKDNHISKGKRNKLLMSLKDIPDGFIERDLRNSQYIARKAKRMLYEVFPNEVLATSGSITDKLRSDWDLINVMKELNLPKYKALGLTEYEERLDKGTEELFKHEVIKDWTKRNDHRHHAMDALAVAFTTHNHIQYINNLNARKDITQDNHPIIKNIENLITEVNSKGKRVFKAPMSSFRESAKEQIEAILVSFKNKNKVVTKNINQTKKEGGFNYQNAKTPRGQLHKETIYGKSKQPLEKPVKINNRFCKKQVGLIINFKEQEAVLHHLKKYDNNEKIAFSNKTLKSDPIQVNGSPLREVKIFEEIFTIRKDINPDNFKTQKHLDKIIDKGIKEVMKKRLEEYNGDFKTAFSDLDKNPIWLNQSKGITIKRATISGVTNAEPLHQAKDHLGNIILDDNGKEIPIDYVSTGNNHHVAIYQDESGNLQEEVVSFYEAVIRKNQDQPIIKKRHPKGWKFLFTMKQNEMFVFSSENFNPSEIDLLDEKNAAIISPNLFRVQKIATKNYMFRHHLETEVTNNLDFTYRHFQATEWLRNLCKVRIDHIGRIVQIGEY

SEQ ID NO: 148 - protein, 1082 aa, Methylosinus trichosporium
MRVLGLDAGIASLGWALIEIEESNRGELSQGTIIGAGTWMFDAPEEKTQAGAKLKSEQRRTFRGQRRVVRRRRQRMNEVRRILHSHGLLPSSDRDALKQPGLDPWRIRAEALDRLLGPVELAVALGHIARHRGFKSNSKGAKTNDPADDTSKMKRAVNETREKLARFGSAAKMLVEDESFVLRQTPTKNGASEIVRRFRNREGDYSRSLLRDDLAAEMRALFTAQARFQSAIATADLQTAFTKAAFFQRPLQDSEKLVGPCPFEVDEKRAPKRGYSFELFRFLSRLNHVTLRDGKQERTLTRDELALAAADFGAAAKVSFTALRKKLKLPETTVFVGVKADEESKLDVVARSGKAAEGTARLRSVIVDALGELAWGALLCSPEKLDKIAEVISFRSDIGRISEGLAQAGCNAPLVDALTAAASDGRFDPFTGAGHISSKAARNILSGLRQGMTYDKACCAADYDHTASRERGAFDVGGHGREALKRILQEERISRELVGSPTARKALIESIKQVKAIVERYGVPDRIHVELARDVGKSIEEREEITRGIEKRNRQKDKLRGLFEKEVGRPPQDGARGKEELLRFELWSEQMGRCLYTDDYISPSQLVATDDAVQVDHILPWSRFADDSYANKTLCMAKANQDKKGRTPYEWFKAEKTDTEWDAFIVRVEALADMKGFKKRNYKLRNAEEAAAKFRNRNLNDTRWACRLLAEALKQLYPKGEKDKDGKERRRVFSRPGALTDRLRRAWGLQWMKKSTKGDRIPDDRHHALDAIVIAATTESLLQRATREVQEIEDKGLHYDLVKNVTPPWPGFREQAVEAVEKVFVARAERRRARGKAHDATIRHIAVREGEQRVYERRKVAELKLADLDRVKDAERNARLIEKLRNWIEAGSPKDDPPLSPKGDPIFKVRLVTKSKVNIALDTGNPKRPGTVDRGEMARVDVFRKASKKGKYEYYLVPIYPHDIATMKTPPIRAVQAYKPEDEWPEMDSSYEFCWSLVPMTYLQVISSKGEIFEGYYRGMNRSVGAIQLSAHSNSSDVVQGIGARTLTEFKKFNVDRFGRKHEVERELRTWRGETWRGKAYI

SEQ ID NO: 149 - protein, 1186 aa, Gardnerella vaginalis
MEGNISYAIGIDVGLNSVGLAAIRLDNNGEPIRILKAMSVIHDAGIDPNGAKESDTRKAISGVARRVRRLYRQRRRRLQKLDFLLHSLGFPVVENKDLDFSDSFTPWIFRAKLADEYIADEKQRKQMLSVAIRHIARHRGWRNPYQSIKSMTQETEYSEFYNELLKNIEKFAPGVSCEGSTPAQLVRDYLLSQQGKASRRLRITTDDRRKNHPNSLDPVLPRKLMQSDNMLEILNIFNVQHIDNKYVREQIINAVFYAKSPRGSAENRVGKDAITGKGKRALKASLAFQKYRIISTISNLRIRENSKERCLTIEEKQSVYKLLTTSTDEYSKEKSAEAPLYTWIDVADCLGIERYKLRGVGSQIEDGESVGNRPPMLNSELAILYANAKSLKQSLITWWLAANRTQEDKEAFIEILSNTVDIEAIHDNPEYQDKYGSVIAFIDSMDETEIAALENISLPNGRAAYSLETLDKLNKQMLETDDDLFEARKKLFNLPNNWRPSEAPIAEPTGNPSVDRVLKIVHRFLISAKNRWGNPERINIEHVRSGFQSKKMANSYKKLLDKRTEGKENLKAMMRNSLHLGTSDSISDADIRRYEAVQRQNGQCLYCGSEITYHTCELDHIVPRKGPGSTNTRENLVATCSSCNAQKCNTPFATWCEESTYCKNHDISVDSAINRVRAFIFPPNSYDKRGASQFKKEVIARLKQKVGDEAFDNRSIESVAWMANELHRRIDWYYNSQNYQTNNGISDITNKAQTNVGVYAGSLTAIARRMSGIDGKLEFFDGRRKTRFDRRHHAVDASVIAMMTPGIAQILAIKCNLRETQLLQGNKVVPGGIDWKEYPTANDQGYQQYANWSVRMNALLELLNEEMRADRIAVVNSIRLRYSNSSVHKDDVHALLKLHVGDEIDSETIRRASTPALYCALTRNPDYDVNNGLPENTDRTILLHDKKLNADDSITFFKSKAAQLFVREGSVEIGNSIHHLRIYEYFEKLKSGKVKKSYGMIRVFQDDLHRYIHEDLFSCDLPEQSISMRYADTKVAHAVQTGNANYLGYLVPGDEIIVDFSHVKLSGYIGEFVEFLNKIGANCAAYKHWVVAGTDDKTTLILKPSMISSEGIDKLYSNCERNNFDYASYEKSIDKILVDKGWRVSVNVLDQYKAATIRRNALGEPRWASRSHLPISWSWDTGENRE

SEQ ID NO: 150 - protein, 1434 aa, Bacteroidetes oral
MKNILGLDLGTNSIGWAYVKQAQNDSEKSEIAELGVRVNPLTVDEKTNFEKGKPISTNADRTLKRGARRNLQRYKLRRQELIELLKDYQVISDKTILAEDGKETTFETLRLRVKSAKEQVSLEELARILLMINKKRGYKSSRKAKNEDEGQLIDGMEIARRLYDENLTTGQLSLQLLKEGKKSLPDYYRSDLQHELDKVWNFQKQFHPDILTDEFYTSIQGKGQKATRESFSSKYGIDTAENKGSREEKKLQAYQWRADATHKELTKEELAFVITEINNNINNSSGYLGAISDRSKELIFANETVGEYLWKQIQNDPHTSLKNQVFYRQDYFDEFERIWETQSGFYPQILTESLKNELRDILIFYQRKLKSQKALVSICEFESKEIPLKDKQGNPISKNGIPVTKLVGPKVAPKSSPLFQEFKIWQNLNNVLVRPKGSRKRKVTTNQQSTLLEGQEPVFELNLEQKELLFEELNLKGNLKTDYCLELIGYSAKEWEMNYPTLEGNKTNKALYEAYLKIIDSEGYDAKKLLKVKTDKDDINLDDIKVSASEIKTMISDIFNELGINTKILDFDAELERKQFEAQASYRLWHLLYSYEGDDSKSGNELLYRLLEDKFGFKREHSKTLANVSLLSDYGNLSTKAIRTIYPYIKENKFSTACELAGYRHSKLSISKEENENRTLKDTLDVLKKNSLRQPVVEKILNQMINLINELIEKHSEKDEKGNIVKYFKFDEIHIELARELKKNAEERRELDSKVREGKDRNEKIITILKSEFGLPYPTKNDITRYRLYEELKDNGYKDLYTNTYIPREKLFSKEIDIEHIIPKSRLFNDSFSNKTICYRQDNLNKGERTAYDYIEGLGKTQLDEYLNRVENLYTNKFITKAKYRNLLKKESEIGDGFIERDLRETQYIAKKAKEMLLQITRHVVSTTGSITDRLRDDWELVNVMRELNLPKYKVLGLTEIQERKNGQTVEVITDWTKRNDHRHHAMDALTVAFTKHSHIQYLNFLNARKDEKHKEYSNIMGIQQLETEKTTDKDGKDRRVFKTPIPNFRQVAKEHLESILISHKTKNKVVTRATNKIAGSKKQQETLSPRGQLHKETVYGKYRRYVQKEEKIGSKFDLQTIERVANPLYKRLLTKRLEENGGDPKKAFTGKNALAKSPIYLDETQTQQLPEKVKLVWLETDFSIRKDITPDNFKDEKSIDKVLDEGIKRILKDRLKSFDGDAKRAFTDLEQNPIWLNKEKGIAIKRVTISGVSNAEPLHTKKDHLGNEIFDDTGKPIPVDYVSTGNNHHIAIYRDENGNLQEKAVSFFEAVTRANQGLPTVDKTYNQHLGWQFLFTMKQNEMFVFPNKETGFDPQEIDLLDPKNKKLISPNLFRVQKISTKNYFFRHHLETSVETHNALNGVTYKSQLGLNGITDIIKVRINHLGDIVHIGEY

SEQ ID NO: 151 - protein, 1341 aa, Peptoniphilus sp.
MWGSRLFEEASTAQDRREHRSNRRRLERRKYRLDLLEELFVEEINKIDPEFFIRLRESKFHFEDRSLKNTFILFNDKMEGGYNDKVFFSKYPTIYHLRSALINGNKEDVRAVFLAIHNILKNRGHFLLAGNDINISLSLNDTLTDLFEYLKIHLGIEVEFENKLKDIEKIALDKNLSKSDKQKKIVQLLETDYKKQLADVFKLSLGLTANMENIFGKENEQGLEFINAENKIKKIQFDSSYEENIAEFDQFYGEYFEIIDICKKIYDAISLSQILVDGKGLSESKVLSYEKHKEDLKLLKKVLKNIDKAYDNKGEDRLVYKVLKEDKDKGTNYVNYSKLSNNGTATTKEEFYKFLSKNLDLKKFGKLNKEDIETLDYINSEILLGRFLPLQKEKINGVIPYQLQMKELTQILNNASKYLPFLNKIEDGMTVKDKIISLIKFRIPYYVGPLNEYNRIENGNGFAWIEKKKNEKIFPWNFNDVVDIEKSAEKFINNLTNKCTYIKEETVLPKNSIIYSKFMVLNELNNLQYGNKKLDIELKMKMYTDLFLEKKDNRKVTEKRILEYFRINGINDGKEKLTGLNNEIHADMKSYRDMCEIMGENFNINVAENIINWITVFHGEKKILINKIKNVYGKMFNDEQISKLSKLNYSDWGRLSKKLLTDIKCYIDADGINFPVSILEAMEVSNKNLMELLSNKYEFISCIDDINNKYFGDRDISASELIDELYVSPAVKRGIWQSVRILEEIVSIIGHNPKKIFIEMTRHNEEKVQKSSRRHNLEELYKAIRKDPEYVELIKEFDSTTDTDSFKIKKLYLYFMQLGKCAYSKEKIDFDKLFTDSYDIDHIYPRSKTKDDSIHNNLVLVKAKYNREKTDVYPIDINIQKNMNSFWNFLYTKKFITEEKYKRLIRTSDLTDEELAKFISRQLVETSQSTKATAEVLKQIYGDSDICYVKAENVSDFRYGSSRQKDKNDIQKLFVKCREVNHFHHAKDAYLNIVVGNVYDVKFTKNPVNFIKKNKMGNKSNYSLNHMFCFDVERNGYKAWDSSETIKTVGRMMKSNDVRITKHVHPTRGELYDATIYKAKIAKTGSYMPLKSSKNTPLSDVTKYGGYTKIKIAYYSVYKYKFSDKNLIKTEIRLIPIPIYLSKNDDDIKEYVKNYLNDRVNSKLIDFTKIYDKLYVNSLIKINGYLYYLGGKTNDRVWIDNAVSIVLDDKIEYLIKRISNDIKYGYEINVSDDELMDIYESLAEKANKKIFYNRLSDFEKIFSNMDVKKKFVKLEKNDKCRVLLQLLNVLTDSQTTYKLEMVGLKHSRSNIGMKISNLEEFKVINSSITGLYSNEIDILNI

SEQ ID NO: 152 - protein, 1391 aa, Lactobacillus gasseri
MTKIKNEYIVGLDVGTNSCGWVAMDFQNTILRMHGKTAIGSHLFDAGNSAADRRAFRTTRRRIKRRKWRLKLLEEIFDPYMTEVDPYFFARLKESGLSPLDKRKNVSSIVFPTALEDKKFYCNYPTIYHLRYDLMSEDKKFDLREIYLAIHHIVKYRGNFLYNTPVKDFEASKIDVKDSLEKLNELYERLDSEFTVELDSSNALEIEKIIRDKKVFKINKVKSIHQLLSLKTENKERTKLIKDVSKQIINAILGYKTKFETILLKNISKDEADDWEFKLTDVDADNKFENLIGDLNENEQEILLEIRNLANAITLSNIVEEGKTLSESMIDKYNKHSDDLELLKQVISDHPDRDKAKKLALAYDLYVNNRHGKLLQAKDVLGSKKTLSKEDFYKEVKKNLDDSKASQEILDTIALDSFMPKQRTNENGVIPYQLHQLELDRIIKNQGKYYPFLKEVNPVSSHLKEAPYKLDELIRFRVPYYVGPLISPNESTKNKQTKKNQNFAWMIRKEQGQITPWNFDQKVDRMASANKFIKRMTTKDTYLLGEDVLPANSLLYQKFTVLNELNNIKINGKRISVPLKEELYNNLFKKNSTVTTNKLKSYLKENYNLINVEIKGLADEKKFNSGLTTYNKLRNLKIFDQQLDDLNYDKDFERIIEWSTIFEDKAIYKDKLKTIKWLSDRQIDKLSKIRMQGWGQLSKKLLSQLTDNNGQTIIEQLWDSQNNFMQIVNQSDFKDAIAVANQNLLVNTSVEDILNEAYTSPANKKAIRQVVKVVDDIVKAASGKVPKQIAIEFTRDADDKAKISQTRANKLRKVYKELSNELASETIRNELERVAKDQKLLKDKYYLYFMQLGRDAYTGEPINIDDLGQYDIDHILPQSFIKDDSLENRVLVKKAVNNGKSDNVPVKLYGNRMAADLGMTIRHMWEKWKDQGLITKTKYNNLIIDPDKINKYESSGFIHRQLVETSQIIKLVSTILQSKYPDTEIIVVKARYNHYLRKHLNLYKSREVNDYHHAIDAYLSAICGNLLYQVYPYLRPFFVYGQYKKFSSDPKKEKIIYDKTRKYNFISQIFENKSNDIISLETKKKVFDKKDIIEKLKHAYNYKYMLVSRETETHDQEMFKMTVYPRLSRDTKKSRNLISKKKDMPTEIYGGYTNNSDAYMVIARINKKKGTEYRVFGVPMRELVNLRKAEKNGRYNAYLKQVLEPEIMYSKNGKKNKTISSFEIVKAKVPYKQVILDGDKKFMLASSTYVQNAKQLTLSQNSMQAITDNCENDTEEEKALEEKALIEAYDEILTNIDKYLPLFDINKFREKLHAGREKFINLSLDVKKDTILQVLNGLHDNAVMPKIKSLGLSTPLGFMQFSSGVPLSENAKLIYQSPTGLFEKRVKISDL

SEQ ID NO: 153 - protein, 1426 aa, Sphingobacterium spiritivorum
MKHILGLDLGTNSIGWALIKQDFENKQGEILGMGSRIIPMSQDILGDFGKGNSVSQTAERTKYRSVRRLRERFLLRRERLHRILNVLGFLPEHYASQIDFTKRFGKFKEETEPKLVYSNEGFIFKKSFEEMLSDFKTHQPQLLEDNKKIPYDWTIYYLRKKALSRKIEKEELAWILLNFNQKRGYYQLRGEEEEENPNKLIEFYSLKIVDVLADEPQKGKSDIWYSLILENGWIYRRSSKTPLFDWKEKTRDFIVTIDLNDDGSVKTDKEGNEKRSFRAPGENDWTLVKKKTEQEIDSSRKTVGTYIYETLLKNPKQKIKGKLVRTIERKFYKTELKQILEKQKEFHPELRQDDLYSDCVRELYKNNEAHQLTLSKKDFVHLFMEDIIFYQRPLGSQKSSISNCTLEFRKYKDENGTEHTQYLKAIPKSNPYYQEFRIWQWMYNLNIYKKEDDTNVTKDFLNTKADFESLFEFLNNRKEVDQKALLKHFKLNDKTHRWNYVEDKKYPCNETKTMILSRLDKVENISDDFLTREMEQKIWHIIYSVNDKVEYEKALKSFAGKNNLEDNSFFEAFKKFPPFKSEYGAFSEKAIKKLLPLMRMGKFWNYNNISEQSKSRIQKIITGEYDENIKDKVREKAIHLTTETDFQGLQLWLVQYIVYGRHSEAAMLGKWNSADDLEEFLKEFKQHSLRNPIVEQVITETLRVVKDIWQKYGNGAKDFFREIHIELGREMKLPAEERERLTRQISENENTNFRIKALLAEMMDDNSVENVRPFSPMQQEILKIYEEGVLNSDIEIEDDILKISKTAQPSSSDLKRYKLWLEQKYKSPYTGQIIPLNKLFTPEYEIEHIIPQSRYFDDSFTNKIICESAVNKLKDNYIGLEFIKKLGGSIVECGNGKSVAILKHDAYEDFIKKHYANNRSKRNKLLLEDIPEKMIERQMNDTRYISKYISGVLSNIVRVEDGTDEGVNSKNIVPGNGKITTQLKQDWGLNDVWNDLILPRFERMNHLTNSTDFTAWNENHQKFLPTVPVEFSKGFSKKRIDHRHHALDALVIACATKDHVNLLNNQSAKSDTKRYDLKKKLMKFEKVAYNHPQTGERIEREAPKQFLKPWETFTIDAKNHLETIIVSFKQNLRVINKATNYYEKYVEKEGTKVKERVEQKGTNWAIRKPMHKETVSGKIDLPRIKVPKGKILTATRKSLDTSFNLKTIGSITDTGIQKILKNYLQYKDNNPELAFSPEGIEDMNKNIEKFNNGKAHQSISKVRVFELGSKFPLGQSGNKKEKYVEAAKGTNLFFAIYQDKNGKRSYETIPLNEVIERQKQGLSVVDLKGVDDFYLSPNDLVYVPSEDELENISMIDFNKMSSERIYKVVSFTGNQIFFVRQDIATSVVNKAEFSTLNKMERAIDGTMIKETCVKLQIDRLGNISKI

SEQ ID NO: 154 - protein, 1361 aa, Lactobacillus casei; identical to SEQ ID NO: 70

SEQ ID NO: 155 - protein, 1436 aa, Bacteroides fragilis
MKRILGLDLGTNSIGWALVNEAENKDERSSIVKLGVRVNPLTVDELTNFEKGKSITTNADRTLKRGMRRNLQRYKLRRETLTEVLKEHKLITEDTILSENGNRTTFETYRLRAKAVTEEISLEEFARVLLMINKKRGYKSSRKAKGVEEGTLIDGMDIARELYNNNLTPGELCLQLLDAGKKFLPDFYRSDLQNELDRIWEKQKEYYPEILTDVLKEELRGKKRDAVWAICAKYFVWKENYTEWNKEKGKTEQQEREHKLEGIYSKRKRDEAKRENLQWRVNGLKEKLSLEQLVIVFQEMNTQINNSSGYLGAISDRSKELYFNKQTVGQYQMEMLDKNPNASLRNMVFYRQDYLDEFNMLWEKQAVYHKELTEELKKEIRDIIIFYQRRLKSQKGLIGFCEFESRQIEVDIDGKKKIKTVGNRVISRSSPLFQEFKIWQILNNIEVTVVGKKRKRRKLKENYSALFEELNDAEQLELNGSRRLCQEEKELLAQELFIRDKMTKSEVLKLLFDNPQELDLNFKTIDGNKTGYALFQAYSKMIEMSGHEPVDFKKPVEKVVEYIKAVFDLLNWNTDILGFNSNEELDNQSYYKLWHLLYSFEGDNTPTGNGRLIQKMTELYGFEKEYATILANVSFQDDYGSLSAKAIHKILPHLKEGNRYDVACVYAGYRHSESSLTREEIANKVLKDRLMLLPKNSLHNPVVEKILNQMVNVINVIIDIYGKPDEIRVELARELKKNAKEREELTKSIAQTTKAHEEYKTLLQTEFGLTNVSRTDILRYKLYKELESCGYKTLYSNTYISREKLFSKEFDIEHIIPQARLFDDSFSNKTLEARSVNIEKGNKTAYDFVKEKFGESGADNSLEHYLNNIEDLFKSGKISKTKYNKLKMAEQDIPDGFIERDLRNTQYIAKKALSMLNEISHRVVATSGSVTDKLREDWQLIDVMKELNWEKYKALGLVEYFEDRDGRQIGRIKDWTKRNDHRHHAMDALTVAFTKDVFIQYFNNKNASLDPNANEHAIKNKYFQNGRAIAPMPLREFRAEAKKHLENTLISIKAKNKVITGNINKTRKKGGVNKNMQQTPRGQLHLETIYGSGKQYLTKEEKVNASFDMRKIGTVSKLAYRDALLKRLYENDNDPKKAFAGKNSLDKQPIWLDKEQMRKVPEKVKIVTLEAIYTIRKEISPDLKVDKVIDVGVRKILIDRLNEYGNDAKKAFSNLDENPIWLNKEKGISIKRVTISGISNAQSLHVKKDKDGKPILDENGRNIPVDFVNTGNNHHVAVYYRPVIDKRGQLVVDEAGNPKYELEEVVVSFFEAVTRANLGQPIIDKDYKTTEGWQFLFSMKQNEYFVFPNEKTGFNPKEIDLLDVENYGLISPNLFRVQKFSLKNYVFRHHLETTIKDTSSILRGITWIDFRSSKGLDTIVKVRVNHIGQIVSVGEY

SEQ ID NO: 156 - protein, 1517 aa, Bacteroides sp.
MKKIVGLDLGTNSIGWALINAYINKEHLYGIEACGSRIIPMDAAILGNFDKGNSISQTADRTSYRGIRRLRERHLLRRERLHRILDLLGFLPKHYSDSLNRYGKFLNDIECKLPWVKDETGSYKFIFQESFKEMLANFTEHHPILIANNKKVPYDWTIYYLRKKALTQKISKEELAWILLNFNQKRGYYQLRGEEEETPNKLVEYYSLKVEKVEDSGERKGKDTWYNVHLENGMIYRRTSNIPLDWEGKTKEFIVTTDLEADGSPKKDKEGNIKRSFRAPKDDDWTLIKKKTEADIDKIKMTVGAYIYDTLLQKPDQKIRGKLVRTIERKYYKNELYQILKTQSEFHEELRDKQLYIACLNELYPNNEPRRNSISTRDFCHLFIEDIIFYQRPLKSKKSLIDNCPYEENRYIDKESGEIKHASIKCIAKSHPLYQEFRLWQFIVNLRIYRKETDVDVTQELLPTEADYVTLFEWLNEKKEIDQKAFFKYPPFGFKKTTSNYRWNYVEDKPYPCNETHAQIIARLGKAHIPKAFLSKEKEETLWHILYSIEDKQEIEKALHSFANKNNLSEEFIEQFKNFPPFKKEYGSYSAKAIKKLLPLMRMGKYWSIENIDNGTRIRINKIIDGEYDENIRERVRQKAINLTDITHFRALPLWLACYLVYDRHSEVKDIVKWKTPKDIDLYLKSFKQHSLRNPIVEQVITETLRTVRDIWQQVGHIDEIHIELGREMKNPADKRARMSQQMIKNENTNLRIKALLTEFLNPEFGIENVRPYSPSQQDLLRIYEEGVLNSILELPEDIGIILGKFNQTDTLKRPTRSEILRYKLWLEQKYRSPYTGEMIPLSKLFTPAYEIEHIIPQSRYFDDSLSNKVICESEINKLKDRSLGYEFIKNHHGEKVELAFDKPVEVLSVEAYEKLVHESYSHNRSKMKKLLMEDIPDQFIERQLNDSRYISKVVKSLLSNIVREENEQEAISKNVIPCTGGITDRLKKDWGINDVWNKIVLPRFIRLNELTESTRFTSINTNNTMIPSMPLELQKGFNKKRIDHRHHAMDAIIIACANRNIVNYLNNVSASKNTKITRRDLQTLLCHKDKTDNNGNYKWVIDKPWETFTQDTLTALQKITVSFKQNLRVINKTTNHYQHYENGKKIVSNQSKGDSWAIRKSMHKETVHGEVNLRMIKTVSFNEALKKPQAIVEMDLKKKILAMLELGYDTKRIKNYFEENKDTWQDINPSKIKVYYFTKETKDRYFAVRKPIDTSFDKKKIKESITDTGIQQIMLRHLETKDNDPTLAFSPDGIDEMNRNILILNKGKKHQPIYKVRVYEKAEKFTVGQKGNKRTKFVEAAKGTNLFFAIYETEEIDKDTKKVIRKRSYSTIPLNVVIERQKQGLSSAPEDENGNLPKYILSPNDLVYVPTQEEINKGEVVMPIDRDRIYKMVDSSGITANFIPASTANLIFALPKATAEIYCNGENCIQNEYGIGSPQSKNQKAITGEMVKEICFPIKVDRLGNIIQVGSCILTN

SEQ ID NO: 157 - protein, 1399 aa, Olsenella uli
MNLRNTTDEYNIGLDMGTNSVGWAVTDKAGAIAHFKGKPTLGSRLFDAAQTAAGARIHRSQRRRYVRRRWRLDLLQSLFQDEVSKVDSEFFCRLRQSRLYVGDREKGHADYTWPIFNDSDFNEVDYYKRFPTIYHLRKWLMETDEKADIRLIYLATHNIVKHRGNFLRENNKSLSSRDANPAQAVKSLRLALNDWCSERDYECAWKGEEDDGAIDEAILNVLADGEKGRSDQAKEIAKLTGVDCGDAKQSKQCNEAIAKAIVGLKVEMKNIFGEFPAEKTSYIYLSSDEDVEAVRESCPDDSGELFQALCKLYSAYILQELLSYADPSGQTISANMVAKYKQYGRDLRLLKELTRTYAPQKYDLFFRGETYAGSSDYVVDEARGYTRYNLGTTKANYDDFQKSVKELFKGTDALQDERYQEMMVAFGEQKFLRRLKTSDNGSIYYQLHLEELHTILENQGKHYPFLLSEEDKIESLVSFRIPYYVGPLTRKNAAIGHDGKERFAWSSRKDGMEHAVITPWNWEEIIDRDKSAEDFIMRMTGDCTYLQGEPVLPKCSLLYEEFCALNEFNGAHWTVDGDDERRFDAAQRERIMCDLFRRTRSVTYNKVSDWLERKYNFTGARVRGGQGEHGFESKLGSYIFFCKDVFKTDGLDEADYTMIEQIILWSTLFEDRDILKRKIEEAYGGDRLTSEQIKVICKKRFTGWGRLSKRLLTDIKVNTDTGRKSIMDVLREGNPNNGQRSRTMVFMEVLRDEDLGFQKAIDGLNRDYFREHNNGLMDVNDLPGSPAIRRSINQAVRIVDEIASIARKEPTNIFIEVTREEDDPRKKGKRTKRRYDAIKSALEKFKKDDPSLWKELCEKAPGDMDERLSLYFMQRGKCMYSGRPIKIEELHTGKYEVDHIIPRSYIKDDSFENKVLVYREENQHKTDALLIDSSIRQKMGGYWRMLHDAKLVGDKKFRNLFRNHIDDKAMKGFVARQIVETSQMVKLVQTLFEARYPNTRIVPVKAGISHDLREAAGLVKCREANDFHHAHDAFLACRIGLFIQKRHPSVYDNPIGLARIMRDYARMQAREYKKSHCLAHTQGFIVNSFLSSGFDEETGEIFKDDWDAKAEVEGIRRVLNCRQCFISRMPVEGDTRYGGRYWGETIYSPKGKHKHEIPLKQGLDPNLYGGYSDLLYSYFLIYEASDVSSGERVLRFIGIPTSIAARMANQKRLEEYVSRLALQENLEHVRMVRKIMKKQLIEVDNCRLLVTAADAVTNATELAFSLDEMKIISTCAKCINGADPSAIDKIGNAQDSFFDNLKRRGSDRCALLFSQLKLDKLSQNFYMISSDDKSKILISILDRIRAKSNSVDLSLVGGAKHAAQMKFDFNAKLNNPASSFVLIDQSVTGMFERRTRIGL

SEQ ID NO: 158 - protein, 1398 aa, Veillonella atypica
METQTSNQLITSHLKDYPKQDYFVGLDIGTNSVGWAVTNTSYELLKFHSHKMWGSRLFEEGESAVTRRGFRSMRRRLERRKLRLKLLEELFADAMAQVDSTFFIRLHESKYHYEDKTTGHSSKHILFIDEDYTDQDYFTEYPTIYHLRKDLMENGTDDIRKLFLAVHHILKYRGNFLYEGATFNSNAFTFEDVLKQALVNITFNCFDTNSAISSISNILMESGKTKSDKAKAIERLVDTYTVFDEVNTPDKPQKEQVKEDKKTLKAFANLVLGLSANLIDLFGSVEDIDDDLKKLQIVGDTYDEKRDELAKVWGDEIHIIDDCKSVYDAIILMSIKEPGLTISQSKVKAFDKHKEDLVILKSLLKLDRNVYNEMFKSDKKGLHNYVHYIKQGRTEETSCSREDFYKYTKKIVEGLADSKDKEYILNEIELQTLLPLQRIKDNGVIPYQLHLEELKVILDKCGPKFPFLHTVSDGFSVTEKLIKMLEFRIPYYVGPLNTHHNIDNGGFSWAVRKQAGRVTPWNFEEKIDREKSAAAFIKNLTNKCTYLFGEDVLPKSSLLYSEFMLLNELNNVRIDGKALAQGVKQHLIDSIFKQDHKKMTKNRIELFLKDNNYITKKHKPEITGLDGEIKNDLTSYRDMVRILGNNFDVSMAEDIITDITIFGESKKMLRQTLRNKFGSQLNDETIKKLSKLRYRDWGRLSKKLLKGIDGCDKAGNGAPKTIIELMRNDSYNLMEILGDKFSFMECIEEENAKLAQGQVVNPHDIIDELALSPAVKRAVWQALRIVDEVAHIKKALPSRIFVEVARTNKSEKKKKDSRQKRLSDLYSAIKKDDVLQSGLQDKEFGALKSGLANYDDAALRSKKLYLYYTQMGRCAYTGNIIDLNQLNTDNYDIDHIYPRSLTKDDSFDNLVLCERTANAKKSDIYPIDNRIQTKQKPFWAFLKHQGLISERKYERLTRIAPLTADDLSGFIARQLVETNQSVKATTTLLRRLYPDIDVVFVKAENVSDFRHNNNFIKVRSLNHHHHAKDAYLNIVVGNVYHEKFTRNFRLFFKKNGANRTYNLAKMFNYDVICTNAQDGKAWDVKTSMNTVKKMMASNDVRVTRRLLEQSGALADATIYKASVAAKAKDGAYIGMKTKYSVFADVTKYGGMTKIKNAYSIIVQYTGKKGEEIKEIVPLPIYLINRNATDIELIDYVKSVIPKAKDISIKYRKLCINQLVKVNGFYYYLGGKTNDKIYIDNAIELVVPHDIATYIKLLDKYDLLRKENKTLKASSITTSIYNINTSTVVSLSNKVGIDVFDYFMSKLRTPLYMKMKGNKVDELSSTGRSKFIKMTLEEQSIYLLEVLNLLTNSKTTFDVKPLGITGSRSTIGVKIHNLDEFKIINESITGLYSNEVTIV

SEQ ID NO: 159 - protein, 795 aa, Prevotella disiens
MEKQRILGLDPGTNSLGWAVLDFDNSKQEYNLVRKGEVIFEEGVGKSKRGEFSKAAYRTFYKSTRKHYFRRRLRKIEVLKVLVKYDFCPYLSDDLLKQWHEKKIYPAVKEFMDWQRTSDAEGKNPYYDRHCCLNEKLDLSLKSDRYVLGRALYHLTQRRGFKSNRLIQNNDENEEGKVKKGISELSTEMQEANCNYLGDYFYKLYTEKGNTVQIRKRYTDREKHYKNEFNAICEKQELNETIVKELDKAIFFQRKLKPQRHGVGKCTFEPNNRRCAISHPDFERFRMLCFINNIKIKTPFEENLRPLNNEEKALIEPLFYRKSIKNFDFEEIAKKLAGKNNYCYIKDDSSKQYKFNYRMSQGASTCQTIAKLKSIFGEEWKNGIAETYTNRRKKEGLKKQAEMVDDIWNVLYSVSECDVLKDFAINKLQLDEKTADNFSKTKLAQGFATLSLKAIRKILPFLEQGFGYTEAVFLANIPTVVGKEYWNNEDIRNDIMEEIKTIFYHNTLKTNDSHNTILFCIKDILSNNFDLAPGAIDKLYHPSMINVYKDVIPNEDGILQLGSPKIDAVKNPMAMRSLHIIRKVVNELLREGIINSDTEVRIEYARELNDANKRHAIADWQKKQYGKHQKYRKEIKELFKAETGFEIEPNETDILKFELWEEQNHICLYTGQEIGISEFVGENPKYDIEHTIPRSLGGDSTKMNMTLCENKFNRENKQKKLPSELANHSEILERIDDWKKKIYILQKKYDSIRTHNGMDKENKDKKIVSMQVRISGSSICVYSQNTLLWLQYGYN

SEQ ID NO: 160 - protein, 1428 aa, Burkholderiales bacterium
MGKTHIIGVGLDLGGTYTGTFITSHPSDEAEHRDHSSAFTVVNSEKLSFSSKSRTAVRHRVRSYKGFDLRRRLLLLVAEYQLLQKKQTLAPEERENLRIALSGYLKRKGYARTEAETDTSVLESLDPSVFSSAPSFTNFFNDSEPLNIQWEAIANSPETTKALNKELSGQKEADFKKYIKTSFPEYSAKEILANYVEGRRAILDASKYIANLQSLGHKHRSKYLSDILQDMKRDSRITRLSEAFGSTDNLWRIIGNISNLQERAVRWYFNDAKFEQGQEQLDAVKLKNVLVRALKYLRSDDKEWSASQKQIIQSLEQSGDVLDVLAGLDPDRTIPPYEDQNNRRPPEDQTLYLNPKALSSEYGEKWKSWANKFAGAYPLLTEDLTEILKNTDRKSRIKIRSDVLPDSDYRLAYILQRAFDRSIALDECSIRRTAEDFENGVVIKNEKLEDVLSGHQLEEFLEFANRYYQETAKAKNGLWFPENALLERADLHPPMKNKILNVIVGQALGVSPAEGTDFIEEIWNSKVKGRSTVHSICNAIENERKTYGPYFSEDYKFVKTALKEGKTEKELSKKFAAVIKVLKMVSEVVPFIGKELRLSDEAQSKFDNPYSLAQLYNLIETERNGFSKVSLAAHLENAWRMTMTDGSAQCCRLPADCVRPFDGFIRKAIDRNSWEVAKRIAEEVKKSVDFTNGTVKIPVAIEANSFNFTASLTDLKYIQLKEQKLKKKLEDIQRNEENQEKRWLSKEERIRADSHGICAYTGRPLDDVGEIDHIIPRSLTLKKSESIYNSEVNLIFVSAQGNQEKKNNIYLLSNLAKNYLAAVFGASDLSQITNEIESTVLQLKAAGRLGYFDLLSEKERACARHALFLNSDSEARRAVIDVLGSRRKASVNGTQAWFVRSIFSKVRQALAAWTQETGNELIFDAISVPAADSSEMRKRFAEYRPEFRKPKVQPVASHSIDAMCIYLAACSDPFKTKRMGSQLAIYEPINFDNLFTGSCQVIQNTPRNFSDKTNIANSPIFKETIYAERFLDIIVSRGEIFIGYPSNMPFEEKPNRISIGGKDPFSILSVLGAYLDKAPSSEKEKLTIYRVVKNKAFELFSKVAGSKFTAEEDKAAKILEALHFVTVKQDVAATVSDLIKSKKELSKDSIENLAKQKGCLKKVEYSSKEFKFKGSLIIPAAVEWGKVLWNVFKENTAEELKDENALRKALEAAWPSSFGTRNLHSKAKRVFSLPVVATQSGAVRIRRKTAFGDFVYQSQDTNNLYSSFPVKNGKLDWSSPIIHPALQNRNLTAYGYRFVDHDRSISMSEFREVYNKDDLMRIELAQGTSSRRYLRVEMPGEKFLAWFGENSISLGSSFKFSVSEVFDNKIYTENAEFTKFLPKPREDNKHNGTIFFELVGPRVIFNYIVGGAASSLKEIFSEAGKERS

SEQ ID NO: 161 - protein, 1025 aa, gamma proteobacterium
MGGYMPQLMRYRLALDIGSTSIGWAMIRLSMQNEPIAIIRMGVRIFSDGRNPKDGSSLAVTRRVARQMRRRRDRLLKRKTRLLNALVQKKFFPEDADARKALVVLNPYELRKEGLYRQLSGPEFGRALFHISQRRGFLSNRKTDKKDNDSSVLKKAIVDLRQQLEVENCQTIGEWLFKQQQSGKSVRARLRGKTQKDKAYDFYIDRAMIAHEFDTLWVSQAKYDPLLFNEDARAILRDILLYQRPLKPVKPGRCTLIPDESRAPLALPLTQQARIYQELNHLRITTPALGAQALTVAQRNTIAALLEKSDVTFVKIAKALGLTSTTEFNLQDIKRDRLKGNATAIILARNQYFGRRWHDFNADLQNLIVDKLVNEGSETALIEWLKANTDVDESAAERVSGVTLPEGYGSLSVAALRRLLPALKEDVVVYSEAVKRAGFDSHSALSLIEQTGELYQELPYYGEVLQRHVGFGSGDPNDSPERRFGKIANPTVHIGLNELRKIINALIKRYGNPAEVVVELARDLKLSREKRKEIQEEQKQRQDRNEKRIKDACEILGIDPLVIDRGKRREISQKMQLWDELNPKDAANRRCPYTGDQISIEKLLSAEVEIEHILPFSKTLDDSLNNKTVAMRRANRDKGNRTPYEAFGESLNPDYDYDAILQRASLMPREKRKRFASDGYQQWLRDDKDFLSRALNDTAYLSRIAKEYLTLICPPNSVRAIPGRMTAQLRAMFGLNRLLSEGGIKNREDHRHHAIDAAVIGVTDQGLLQKFSRASARTRELQLSRLVDDMPLPWDTYREHVTRALEHLVVSHKPDHGYQGKMHEDTAWGLRDNGQVTRRVRSEDGGPRQRLLENKNVVKINSTRDFSRHGIDEQGQVNAYKGYVGGSNYCIEIWIDEKGKWNSDVVSTFQAYQIVRELGEKAAWQKLRNPLLSLSAKPLVMRLIIDDVVKMQIAGQNKIMRVVKIAQNGQIFFAEHNEANVDARDKDKNNPFKYISKTAGSLQKAGGIHMAISPIGDARPVRYGR

SEQ ID NO: 162 - protein, 1364 aa, Pediococcus acidilactici
MGDRKYNLGLDIGTSSIGFAAVDENNQPIRVKGKTAIGVRLFEEGKTAADRRGFRTTRRRLSRRRWRINLLNEIFDAHLAEVDPTFLARLKESNRSNLDPKKSFQGSLLFPERKDYQFYEEYPTIYHLRKALMEKDRKFDFREIYLAVHHIIKYRGNFLNGTPMRSFKVENIELDTLFDQLNQLYAEIVPDNELAFDLAQVADVKDVLSSTTIYKMDKKKQLVKMMLLPASNKALQSENKKIVTQFVNAILNYKFKLDVLLQVETDADWSLKLNDEGADDKLEEFTGDLDENRLEIIDLLQRLHNWFSLNEITKDGNSLSAAMVEKYENHHHHLGLLKKVIENHPDAKKAKALKETYTAYVGKTDDKTQNQDDFYKAVEKNLDDSPDAKEIKRLIQLDQFMPKQRTGQNGAIPHQLHQQELDQIIEKQSKYYPFLAEPNPNVKRRKDAPYKLDELIAFKIPYYVGPLVTPEEQAQNGENVFAWMKRKAAGPITPWNFDEKVDRMESANRFIRRMTTKDTYLFGEDVLPAESMIYQKFVVLNELNNLKINGRHLSLKDKQDVYNDLFKQQKTVSIKALQNYYVTKKKAATAPTVGGLADPKKFLSSLSTYIDFKNMFGERVNDPQFQEDLEQIVEWSTIFEDRGIFKAKLQALGWLSEKQIQQLVAKRYKGWGRLSKKLLTGLKNAEGYSILDEMWRSTGNFMQIQSRPEFAALIQQANEKQFEGNDPDNVWENIENILGDAYTSPQNKKAIRQVVKVVQDIEKAVGNPPEKIAIEFTREAAANPQRTQSRLRTLEKLYESAEEVVDAGLTAELAEFKENKHVLSDKYYLYFTQLGRDVYTGDTISLDKLNDYDVDHILPQSFIKDDSLDNRVLTIRAVNNGKSDNVPAKMFGKKMGSFWRYLLDNGMISKRKYNNLITDPDNISKYAQKGFINRQLVETSQVIKLTANILNGIYDKDTEIIEVPAKMNSQMRKMFDLVKVREVNDYHHAFDAYLTIFIGNYLYKCYPKLQPYFVYDNFKKFGNKEDIGHKRFNFLGKIEREKKVVAPETGEILWSNVAPNETIKQIKKVYDYKFMIVSREITTRRAELFNQTVYPKNYHGKLIPIKEDRPTDLYGGYSGNTDAYLAIVALEDKKKGKYFKVVGIPTRVAAKLEKLKQQDSQQYLQALHKVIAPQFTKSTKKGIKKTEFEIVLDKVHYRQLVQDGPVKMMLGSSTYKYNAKQLVLSEKALQVIADDRKFDETQKDDNLIAVYDEILSIVNQSFDLYDINGFRKKLNDNRDQFIDLPAETKYEGRKVVAHGKREMILEILKGLHANAAFGNLKPIGFSTAFGQLQVPNGIILSKNAILIHQSPSGLFERKIKLSDL

SEQ ID NO: 163 - protein, 1364 aa, Peptoniphilus duerdenii
MKNLKEYYIGLDIGTASVGWAVTDESYNIPKFNGKKMWGVRLFDDAKTAEERRTQRGSRRRLNRRKERINLLQDLFATEISKVDPNFFLRLDNSDLYREDKDEKLKSKYTLFNDKDFKDRDYHKKYPTIHHLIMDLIEDEGKKDIRLLYLACHYLLKNRGHFIFEGQKFDTKNSFDKSINDLKIHLRDEYNIDLEFNNEDLIEIITDTTLNKTNKKKELKNIVGDTKFLKAISAIMIGSSQKLVDLFEDGEFEETTVKSVDFSTTAFDDKYSEYEEALGDTISLLNILKSIYDSSILENLLKDADKSKDGNKYISKAFVKKFNKHGKDLKTLKRIIKKYLPSEYANIFRNKSINDNYVAYTKSNITSNKRTKASKFTKQEDFYKFIKKHLDTIKETKLNSSENEDLKLIDEMLTDIEFKTFIPKLKSSDNGVIPYQLKLMELKKILDNQSKYYDFLNESDEYGTVKDKVESIMEFRIPYYVGPLNPDSKYAWIKRENTKITPWNFKDIVDLDSSREEFIDRLIGRCTYLKEEKVLPKASLIYNEFMVLNELNNLKLNEFLITEEMKKAIFEELFKTKKKVTLKAVSNLLKKEFNLTGDILLSGTDGDFKQGLNSYIDFKNIIGDKVDRDDYRIKIEEIIKLIVLYEDDKTYLKKKIKSAYKNDFTDDEIKKIAALNYKDWGRLSKRFLTGIEGVDKTTGEKGSIIYFMREYNLNLMELMSGHYTFTEEVEKLNPVENRELCYEMVDELYLSPSVKRMLWQSLRVVDEIKRIIGKDPKKIFIEMARAKEAKNSRKESRKNKLLEFYKFGKKAFINEIGEERYNYLLNEINSEEESKFRWDNLYLYYTQLGRCMYSLEPIDLADLKSNNIYDQDHIYPKSKIYDDSLENRVLVKKNLNHEKGNQYPIPEKVLNKNAYGFWKILFDKGLIGQKKYTRLTRRTPFEERELAEFIERQIVETRQATKETANLLKNICQDSEIVYSKAENASRFRQEFDIIKCRTVNDLHHMHDAYLNIVVGNVYNTKFTKNPLNFIKDKDNVRSYNLENMFKYDVVRGSYTAWIADDSEGNVKAATIKKVKRELEGKNYRFTRMSYIGTGGLYDQNLMRKGKGQIPQKENTNKSNIEKYGGYNKASSAYFALIESDGKAGRERTLETIPIMVYNQEKYGNTEAVDKYLKDNLELQDPKILKDKIKINSLIKLDGFLYNIKGKTGDSLSIAGSVQLIVNKEEQKLIKKMDKFLVKKKDNKDIKVTSFDNIKEEELIKLYKTLSDKLNNGIYSNKRNNQAKNISEALDKFKEISIEEKIDVLNQIILLFQSYNNGCNLKSIGLSAKTGVVFIPKKLNYKECKLINQSITGLFENEVDLLNL

SEQ ID NO: 164 - protein, 1089 aa, Corynebacterium matruchotii
MNSANVNYRVGIDVGSYSLGMAAIAIDDDGKPTEILSAISLIHDSGVDPDSAKSAATRLATSGIARRTRRLYRRKRKRLAKLDKFISSQGWPLKEFEKYEDPFYPWRVRAELATTAITDQQELGEKLSIALRHIARHRGWRNPYSKVTALYTVTEPSDAFLAMQEECAKQLGRTIPETITVGQLVTGMNLGKTRLRGENSLLAARPRQSDNANEIHTIAKVQGLSNELVRQIIDHVFAAESPKGSAAEQVGKDPLQPTKKRALKASDAFQQYRIAALIGNLRIRGGKGNRRLTTEETRLVFDYLRSLPAKQEPTWQLVAEQLKIDRGNLVGTAIMTDDGERAGAKPPVHDTNRIMENTKIKPLATWWKSADADARAAMVKALSNAEVDDFDSQAGAQVQEFFFGISDEDQEKLDGLHLPIGRAAYSEDTLDRLTKRMIGEGMDLYEARQAEFKISNDWAPPAPEIGERVGNPAVDRVLKATARWLNAAERQWGAPKSVNIEHVRAAFMSESSARELDRDNQQRAKRNVKVVAEMQEKLGIEGRPSRADVWRFQSIQRQNGKCAYCGAEISFKNSEMDHIIPQAGEGSTNTRDNLVAVCRECNSSKSNIAFAVWAENTSRPGVSVQKAIERTHHWVTDSGLRKPEFDKFRKQVCDRLRRKATDEPIDARSLESVAWMANELRSRIAQKFKDGDTKVRVYKGALTAEARRASGISGKLEFVDGKGKSRLDRRHHAVDAAVVAFTSNYVAETLALRSNMKFDQELRRKAPQWREFTGSDHVHQVEWTKWKYRMQALAELLNNALVQDRIVVMHNLRLRLGNGAAHEDTIGKLTRLKVGDAISTTDIDRASSEALWCALTRDPDYDPKTGLPENPNRTIRIHGTHLTASDEITVFPVAAASIPIRDGFAKLGSNYHHVRLFRVPSGKKYKYCLMQVYTVDLLKFRKEDLFTVELKPQTISVRTCEALLRKALANGTAEYLGWLVSDDELLIDTSSFDTPGIVKLREEYGPVNRWRLAGLTSVTRLNLRPLYLSKEGLKPNVNPEIKKIIDNRSWIITVNKLFSSGHVKIIRRDALGRPRLHSAAHLPICWEVK

SEQ ID NO: 165 - protein, 1134 aa, Streptococcus mitis
MNGLVLGLDIGIASEGVGILEKNSGKIIHANSRLFPAATADNNVERRKNRQARRLNRRKKHRGVRFQDLFEDYGLLTDFSKVSINLNPYRLRVDGLNQQLTNEELFIALKNIVKRRGISYLDDASEDGGAVSSDYGKAVEENRKLLAEQTPGQIQLERFEKYGQVRGDFTVVENGEKLRLINVFSTSAYKKEAERILRKQQEFNNQITDEFIEDYLKILTGKRKYYHGPGNEKSRTDYGRFRTDGTTLDNIFGILIGKCTFYPEEYRASKASYTAQEFNLLNDLNNLTVPTETKKLSEEQKKVIVEYAKEAKTLGASTLLKYIAKMIDASVDQIRGYRVDVNNKPEMHTFEVYRKMQSLETISVGELSRNVLDELAHILTLNTEREGMEEAINTKLKDSFSQDQVLELVQFRKNNSSLFSKGWHNFSLKLMMELIPELYETSEEQMTILTRLGKQKSKETSKRTKYIDEKELTEEIYNPVVAKSVRQAIKIINEATKKHGIFDNIVIEMARENNEEDAKKDYIKRQKANQDEKNAAMEKAAFQYNGKKELPDNIFHGHKELATKIRLWHQQGEKCLYTGKTIPISDLIYNQYKYEIDHILPLSLSFDDSLSNKVLALATANQEKGQRTPFQALDSMDDAWSYREFKSYVKDLKSLSNKKKDYLLTEEDISKIEVKQKFIERNLVDTRYSSRVVLNALQDFYKSHQFDTTISVVRGQFTSQLRRKWGLEKSRETYHHHAVDALIIAASSQLRLWKKQNNPLITYKEGQFVDSQTGEIISLTDDEYKELVFKAPYDHFVDTLSSKTFEDSILFSYQVDSKFNRKISDATIYATRKAKLDKEKKEYTYTLGKIKDIYSLGTKTPSKTGFYKFLDLYNKDKSQFLMFQKDRKTWDEVIEKIMEQYRPFKEYDKTGKLVDFNPFEKYRQENEPIRKYSKKGNGPEIKSLKYYDILLGKHKNITPEGSRNTVALLSLNPWRTDVYYNMETKKYEFLGLKYADLPFEEGGAYGISTETYNELREKEGIGKNSEFKFTLYKNDLILIKDTETNCQQIFRFWSRTGKDNPKSFEKHKIELKPYEKARFEKGEELEVLGKVPPSSNQLQKNMQIENLSIYKVKTDVLGNKHFIKKEGDKPKLKF

SEQ ID NO: 166 - protein, 1373 aa, Streptococcus bovis
MTKKNYSIGLDIGTNSVGWAVITDDYKVPAKKMKVLGNTDKKYIKKNLLGALLFDSGETAEATRLKRTARRRYTRRKNRLRYLQEIFAEEMTKVDESFFQRLDESFLRWDDDNKKLGRYPIFGNKADVVKYHQEFPTIYHLRKHLADSSEKADLRLVYLALAHMIKFRGHFLIEGELNAENTDVQKIFADFVGVYDRTFDDSHLSEITVDAASILTEKISKSRRLENLIKYYPTEKKNTLFGNLIALALGLQPNFKMNFKLSEDAKLQFSKDSYEEDLGELLGKIGDDYADLFTSAKNLYDAILLSGILIVDDNSTKAPLSASMIKRYVEHQEDLEKLKEFIKANKSELYHDIFKDKNKNGYAGYIENGVKQDEFYKYLKNTLSKIAGSDYFLDKIEREDFLRKQRTFDNGSIPHQIHLQEMHAILRRQGDYYPFLKENQDRIEKILTFRIPYYVGPLARKDSRFSWAEYHSDEKITPWNFDKVIDKEKSAEKFITRMTLNDLYLPEEKVLPKHSHVYETYAVYNELTKIKYVNEQGKDSFFDSNMKQEIFDHVFKENRKVTKEKLLNYLNKEFPEYRIKDLIGLDKENKSFNASLGTYHDLKKILDKAFLDDKVNEEVIEDIIKTLTLFEDKDMIHERLQKYSDIFTADQLKKLERRHYTGWGRLSYKLINGIRNKENNKTILDYLIDDGSANRNFMQLINDDTLPFKQIIQKSQVVGDVDDIEAVVHDLPGSPAIKKGILQSVKIVDELVKVMGDNPDNIVIEMARENQTTNRGRSQSQQRLKKLQNSLKELGSNILNEEKPSYIEDKVENSHLQNDQLFLYYIQNGKDMYTGDELDIDHLSDYDIDHIIPQAFIKDDSIDNRVLTSSAKNRGKSDDVPSLDIVRARKAEWVRLYKSGLISKRKFDNLTKAERGGLTEADKAGFIKRQLVETRQITKHVAQILDARFNTESDENDKVIRDVKVITLKSNLVSQFRKDFEFYKVREINDYHHAHDAYLNAVVGTALLKKYPKLASEFVYGEYKKYDIRKFITNSSDKATAKYFFYSNLMNFFKRVIRYSNGKVIVRPVVEYSKDTEDIAWDKKSNFRTICKVLSYPQVNIVKKVETQTGGFSKESILPKGDSDKLIPRKTKKAYWDTKKYGGFDSPTVAYSVFVVADVEKGKAKKLKTVKELVGISIMERSFFEENPVEFLENKGYHNIREDKLIKLPKYSLFEFEGGKRRLLASASELQKGNEMVIPGHLVKLLYHAQRINSFNSTKYLDYVSAHKKEFEKVLSCVEDFANLYVDVEKNLSKIRAVADSMDNFSIEEISNSFINLLTLTALGAPADFNFLGEKIPRKRYTSTKECLNATLIHQSITGLYETRIDLSKIGEE

SEQ ID NO: 167 - protein, 1099 aa, Corynebacterium accolens
MSLLYRVGIDVGTYSLGCTAIEVDDNDQPVSILSSVSLIHDSGLDPDQQKRAVTRLASSGVARRTRRLYRRRRRRMVKLENFLTAQGWETLPFERYSDPYLPWHARVALVNGYISDDTQRGQYLSIAFRHIANHRGWRNPYWKVSSLYSPDKPSDAFEQIRKELEASTGRQIPETATVGQLISFAQFGKDRLRGGGKQKDKKKPQEQVNQAVISARLHQIDHAREINEICRVQKIDDTLRKQILDLVFAAESPKGAQKGRVGKDPLQPKLFRALKASDAFQQYRIAALTGNLRIYRNGVTVPLDRDEKLIVFNYLVNLPKKEEPSWLKIAEILNIDRGQLRGTATMTDDGERAGATPPVHDTNRTILDSKVKPLAHWWENASDDERAAMLKSLSNSEVEDFDSPAGAQVQAFFADLDETEQEKLDSLHLPMGRAAYSEDTLMRLTNRMLDENLDLYEARLAEFGIPKDWAPPAPRIGEPVGNPAVDRVLKGVARWLEAAADEWGAPKSVVIEHVRDGFVSKSKAIEIDRANNNRHKRNRELFQKMQENLGIEGKVRSSDLWRYQSVQRQNCQCAYCGSPITYTTCEMDHIVPRAGEGSTNTRDNLVATCHRCNLAKKNIPFAVWAEKSTIPGVSVKEALDRTRHWSEDSGMSKKDFQKFRKNVCERLNRTVVDEPLDARSMESVAWMANELRGRVAQRFQEENTTVNVYRGALTAEARRAAGITDKLRFIDGTGKSRLDRRHHAVDAAVVAFIHNYVAETLAIRSNKKREAQLLQGTSQWKEFTGSDDKHRAVWNAWIPKMQKLAVLLQIALDEDRIVVTSNLRLRLGNGRAHEDTISELKTIRVGDAISVTDIDRASSEALWCALTREPDFDEKDGLPENPNRRIRVHGTWYDAEDEIEVFPVGAGAIKVRGGYAKLSRFHHARVYKIPGKKAPIYCMLRVYNTDLVQHRHEDLFSVELKPQTMSVRQAEPKLRKALAENTAEYLGWLVTDDELIIDTSTFRTGLIEEMQSEFGLVRRWRLDGFDSPSLLTLRPLHMSAEGLPDDCALGSRKIIDTKGWRVSINKVFNAGNTTVVRRDALGRARLTSNAHLPISWKEE

SEQ ID NO: 168 - protein, 1054 aa, Actinobacillus pleuropneumoniae
MKLTPLNYILGLDLGIASVGWAVVEIDEQENPLGLIDVGVRTFDRAEVAKTGESLALARRLARSSRRLVKRRADRIKKVKRLLKSENILLSADEQLPNDVWQLRVKGLDQKLERQEWAAVLLHLLKHRGYLSQRKNESKSENKELGALRSGVAANHQILQSAEYRTPAEIAVKKFHVEEGHIRNQRGAYTHTFSRLDLLAEIELLFTRQTELGNPHTSAKLLENLTALLMWQKPALAGEAILKMLGKCTFEPTEYKAAKNSYSAERFVWLTKLNNLRILEQGAERALTDNERFALLDQPYEKAKFTYAQARTMLALPDEAIFKGVRYQGEDKKAVETKTILMEMKAYHQIRKALENADLKAEWNELKNNSELLDDIGTAFSLHKTDEDICRYLDGKLSESILNALLENLNFDKFIQLSLKALQQILPLMLQGQRYDEAVSAIYGDHYGKKSAEINRLLPTIPADEIRNPVVLRTLTQARKVINAVVRLYGSPARIHIETGREVGKSYQDRKKLEKQQEDNRKHRESAVQKFKEYFPNFVGEPKGKDILKMRLYELQQAKCLYSGKSLELHRLLEKGYVEVDHALPFSRTWDDSFNNKVLVLANENQNKGNLTPYEWLDGKNNSEPWQNFVARVQTSGFSHTKKQRILSHKLDEKGFIERNLNDTRYVVRFLCNFIADNMLLTGKGKRKVFASNGQITALLRGRWGLQKVRDDNDRHHALDAVVVACSTVAMQQKITRFVRYEEGNVFSGERIDRETGEIIPLHFPSPWAFFRENVEIRIFSENPKLELENRLPDYPQYNHEFVQPLFVSRMPTRKMTGQGHMETVKSAKRLDEGLSVLKVPLTQLKLNDLERMVNREREMALYESLKVRLEQFDNDPAKAFAEPFYKKGGALVKAVRVEQTQKSGVLVRDGNGVADNASMVRVDVFTKAGKYFLVPIYTWQVAKGILPNKAVTANVDEIDWLEMDESYQFIFTMYPNDLVKVKLKKEEFFGYYGGLDRATGAIVIKEHDLEKSKGRQGIYRIGVKLALSFEKYQVDELGKNIRPCRPTKRQHVR

SEQ ID NO: 169 - protein, 1369 aa, Lactobacillus iners
MNNNYYLGLDLGTNSVGWAVTDDHYNIIKFHGKHMWGMRLFEEAETAKDRRLHRQARRRRQRLVERINLLEELFDKEISKVDQGFFARKKESDLHFEDKTTKSEYALFNDKSYTDRDYYKQYPTIFHLIMDLIENDKKRDIRLVYLACHYLIKHRGHFIFDGKNFTVDNSFENLLDKLITYLKDNDDITLSFPKDQLINIFKNSNLNSTEKSDQLKPFFGRTNLEKGIIKLLSGGKQDLSNMFRDETLKNSNYKNLKFSDNRFDDERDGYAADLGDRIDLLILLKQIYDASILESMMSQARVSIDGHKYISSAKVCAYEKHKSDLKRLKSLIKKYLPSEYNNIFRKITEKDNYVAYSKSNITNNKREKALKYVKYVDFTKYLTKKLKTIKTQDAEDDQEIFEIKGELEKQSFLPKQRTLDNSIIPYQLHLMELKKILDNQSKYYDFLLAKDDQEGITVKDKIISLLTFRLPYYIGPVNPAVHGKFAWVKRLANGKVTPWNYKEKIDIDASHEEFIKTKLSKCSFLIGCDVLPKNSLLYQKYMVLSELNTIKFNGVNISEKLKDDIYQNLFKNIQKVTKKRLQNYIKEHENIIGDVIVTGIDNAFKQGLVSYLKFKKIIGDKVDDDRYQKVLEKIIRDITLYDECAGKKIKKEYKDSDLFTEDELNKIVKLTFNDWGRLSAELLDQLEGEDTVSGETGKIIEFMQKHNYNLMQLMSKKFTFKSKIDEINKSYYQHDKFNYKSMIDSLYVSPATKRILWQSLKVVHEISKIMKHDPEKIFIEMARSKEDHPKRKLSRKADLKQVYKDSKKQIISIIGKDKYQDLSNELDNKDDRDLRWDNLYLYYTQLGRSMYSLKPIDISELMNKNLYDQDHIFPKSKKYDDSIENRVLVEKELNVKKSDIYPISDANIIPQKIKGQVESFWKMLYDHKLIGDKKYARLIRSKAFTDDELAGFIARQLVETRQATKETADLLKRLCPKSRIVYAKAQNASIFRQKFDIPKSRTINDLHHAQDAYLNIVVGNIFDTKFTQDPRNFIKNTKDSRNYNLEKIYDYNVERNNYVAWIAPDGETNGTIANVKCNLSTKDFRVTRPSFYKKGALFNQNLSRKGSNLAPIKEHSPKSNPLKYGGYSGKNNSFFVVVAGKDNKGKDIVKLIPVNTLIYNKMLHCDYKAKQELLTSYVANNFAINNFRIVKDDIKMYSLVKIDGAYYYLVGGTDERIEVKNAMQLLLSKDSIKAVKILEKESKDQFANIKNYKDIDIKLGRTFNEVVSKYTNSVFGKSMLISDKYRKDIFKSVEKSILEFNHLDTIGKADNLLKFVTLMRPSGSAHSLKMVGLIERIRKSNVISNFNEFKLINQSVTGLFENEEDLLKL

SEQ ID NO: 170 - protein, 1420 aa, Bifidobacterium bifidum
MSRKNYVDDYAISLDIGNASVGWSAFTPNYRLVRAKGHELIGVRLFDPADTAESRRMARTTRRRYSRRRWRLRLLDALFDQALSEIDPSFLARRKYSWVHPDDENNADCWYGSVLFDSNEQDKRFYEKYPTIYHLRKALMEDDSQHDIREIYLAIHHMVKYRGNFLVEGTLESSNAFKEDELLKLLGRITRYEMSEGEQNSDIEQDDENKLVAPANGQLADALCATRGSRSMRVDNALEALSAVNDLSREQRAIVKAIFAGLEGNKLDLAKIFVSKEFSSENKKILGIYFNKSDYEEKCVQIVDSGLLDDEEREFLDRMQGQYNAIALKQLLGRSTSVSDSKCASYDAHRANWNLIKLQLRTKENEKDINENYGILVGWKIDSGQRKSVRGESAYENMRKKANVFFKKMIETSDLSETDKNRLIHDIEEDKLFPIQRDSDNGVIPHQLHQNELKQIIKKQGKYYPFLLDAFEKDGKQINKIEGLLTFRVPYFVGPLVVPEDLQKSDNSENHWMVRKKKGEITPWNFDEMVDKDASGRKFIERLVGTDSYLLGEPTLPKNSLLYQEYEVLNELNNVRLSVRTGNHWNDKRRMRLGREEKTLLCQRLFMKGQTVTKRTAENLLRKEYGRTYELSGLSDESKFTSSLSTYGKMCRIFGEKYVNEHRDLMEKIVELQTVFEDKETLLHQLRQLEGISEADCALLVNTHYTGWGRLSRKLLTTKAGECKISDDFAPRKHSIIEIMRAEDRNLMEIITDKQLGFSDWIEQENLGAENGSSLMEVVDDLRVSPKVKRGIIQSIRLIDDISKAVGKRPSRIFLELADDIQPSGRTISRKSRLQDLYRNANLGKEFKGIADELNACSDKDLQDDRLFLYYTQLGKDMYTGEELDLDRLSSAYDIDHIIPQAVTQNDSIDNRVLVARAENARKTDSFTYMPQIADRMRNFWQILLDNGLISRVKFERLTRQNEFSEREKERFVQRSLVETRQIMKNVATLMRQRYGNSAAVIGLNAELTKEMHRYLGFSHKNRDINDYHHAQDALCVGIAGQFAANRGFFADGEVSDGAQNSYNQYLRDYLRGYREKLSAEDRKQGRAFGFIVGSMRSQDEQKRVNPRTGEVVWSEEDKDYLRKVMNYRKMLVTQKVGDDFGALYDETRYAATDPKGIKGIPFDGAKQDTSLYGGFSSAKPAYAVLIESKGKTRLVNVTMQEYSLLGDRPSDDELRKVLAKKKSEYAKANILLRHVPKMQLIRYGGGLMVIKSAGELNNAQQLWLPYEEYCYFDDLSQGKGSLEKDDLKKLLDSILGSVQCLYPWHRFTEEELADLHVAFDKLPEDEKKNVITGIVSALHADAKTANLSIVGMTGSWRRMNNKSGYTFSDEDEFIFQSPSGLFEKRVTVGELKRKAKKEVNSKYRTNEKRLPTLSGASQP

SEQ ID NO: 171 - protein, 1092 aa, Ilyobacter polytropus
MKYSIGLDIGIASVGWSVINKDKERIEDMGVRIFQKAENPKDGSSLASSRREKRGSRRRNRRKKHRLDRIKNILCESGLVKKNEIEKIYKNAYLKSPWELRAKSLEAKISNKEIAQILLHIAKRRGFKSFRKTDRNADDTGKLLSGIQENKKIMEEKGYLTIGDMVAKDPKFNTHVRNKAGSYLFSFSRKLLEDEVRKIQAKQKELGNTHFTDDVLEKYIEVFNSQRNFDEGPSKPSPYYSEIGQIAKMIGNCTFESSEKRTAKNTWSGERFVFLQKLNNFRIVGLSGKRPLTEEERDIVEKEVYLKKEVRYEKLRKILYLKEEERFGDLNYSKDEKQDKKTEKTKFISLIGNYTIKKLNLSEKLKSEIEEDKSKLDKIIEILTFNKSDKTIESNLKKLELSREDIEILLSEEFSGTLNLSLKAIKKILPYLEKGLSYNEACEKADYDYKNNGIKFKRGELLPVVDKDLIANPVVLRAISQTRKVVNAIIRKYGTPHTIHVEVARDLAKSYDDRQTIIKENKKRELENEKTKKFISEEFGIKNVKGKLLLKYRLYQEQEGRCAYSRKELSLSEVILDESMTDIDHIIPYSRSMDDSYSNKVLVLSGENRKKSNLLPKEYFDRQGRDWDTFVLNVKAMKIHPRKKSNLLKEKFTREDNKDWKSRALNDTRYISRFVANYLENALEYRDDSPKKRVFMIPGQLTAQLRARWRLNKVRENGDLHHALDAAVVAVTDQKAINNISNISRYKELKNCKDVIPSIEYHADEETGEVYFEEVKDTRFPMPWSGFDLELQKRLESENPREEFYNLLSDKRYLGWFNYEEGFIEKLRPVFVSRMPNRGVKGQAHQETIRSSKKISNQIAVSKKPLNSIKLKDLEKMQGRDTDRKLYEALKNRLEEYDDKPEKAFAEPFYKPTNSGKRGPLVRGIKVEEKQNVGVYVNGGQASNGSMVRIDVFRKNGKFYTVPIYVHQTLLKELPNRAINGKPYKDWDLIDGSFEFLYSFYPNDLIEIEFGKSKSIKNDNKLTKTEIPEVNLSEVLGYYRGMDTSTGAATIDTQDGKIQMRIGIKTVKNIKKYQVDVLGNVYKVKREKRQTF

SEQ ID NO: 172 - protein, 994 aa, Streptococcus downei
MENQRGKRQRITHQEPYSIGLDIGTASVGSAVINNDLTVPQKRFKVRDINGNVIKTIKKNMSSVLIFDEANPAKGARTKRTSRRRYTRRNFRLLELKKLFEKEIEKIDPNFFHRIKEDSFFNWNDKEFDKHPLFGNLKEEKKFHNNYPTVFHLRNEIGKNSSKKFDLRLVYLALAHIIKYRGHFLDETFDPDASVSVEKRLNDFIVEYNELFDKDLRSEAKFSEILMSDSSNSVKIESTLSLYPSEKNTIFQVFLKLIVGNQGDFNKFFKDELESSSHSGKLVFSSDEVEDEKEELISIIGEDYLDIINLCQSLYSTVALAKIISTDTGESNTPLSASMVKRYNEHKGDLANLKGIVKHFIPEKYEEVFGEHSKTGYTAYIRNPNKMPEKKFYDYLYHEGEKGKISGILSDSRIYELPAVQKFILKIEQKSFLKKQRTKENGLIPYQLHLKELKIIIENQSEYYPFLHEIEEKLEKLLTFRIPYFVGPLAQTKYINPRFNWLVRKSEDHIKPWNFSEIVDEEKSATKFIEKLISNDQFLFGEKVLPKRSIIYQQFLIFNELTKVSYQIKDGPSRNFDSETKEEIFNSLFKKNKLGCVTVVDLKNYIKNDQCLSEKEDIQIEGIKKKFNSSYSTYADLSEISGLKELLDDDTQLDLVEEIIRILTVFEDKKMRTKQLEKLNLPANVDIEKLCKKHYKGWANVSRQLIDGIADRSRGFKKTILDYLKDDDIPNNDAFSTKVQKSLNRNFAQLITDKSLDFARKLDESYKIDVKKDYPSLVEDIPGSPAIRRAILQSLYTVDEIIGVMGRMPKNIVIEMARTNEVSDSPKTRKERIKKLIKETENDADALNFGISKVSEIFDEVKKDENLFKELEVYLYFLQEGKDMYGTETREGHRQPKEINFYDVKNSTGKYHIDHIIPQSLYSGNPLDNIVLTESTNNKIKDKDVPDEATVYEMKNFWLYLMKKGAISKKKFSFLTKIEQGGLSNEDKFGFINR

SEQ ID NO: 173 - protein, 1052 aa, Aminomonas paucivorans
MIGEHVRGGCLFDDHWTPNWGAFRLPNTVRTFTKAENPKDGSSLAEPRRQARGLRRRLRRKTQRLEDLRRLLAKEGVLSLSDLETLFRETPAKDPYQLRAEGLDRPLSFPEWVRVLYHITKHRGFQSNRRNPVEDGQERSRQEEEGKLLSGVGENERLLREGGYRTAGEMLARDPKFQDHRRNRAGDYSHTLSRSLLLEEARRLFQSQRTLGNPHASSNLEEAFLHLVAFQNPFASGEDIRNKAGHCSLEPDQIRAPRRSASAETFMLLQKTGNLRLIHRRTGEERPLTDKEREQIHLLAWKQEKVTHKTLRRHLEIPEEWLFTGLPYHRSGDKAEEKLFVHLAGIHEIRKALDKGPDPAVWDTLRSRRDLLDSIADTLTFYKNEDEILPRLESLGLSPENARALAPLSFSGTAHLSLSALGKLLPHLEEGKSYTQARADAGYAAPPPDRHPKLPPLEEADWRNPVVFRALTQTRKVVNALVRRYGPPWCIHLETARELSQPAKVRRRIETEQQANEKKKQQAEREFLDIVGTAPGPGDLLKMRLWREQGGFCPYCEEYLNPTRLAEPGYAEMDHILPYSRSLDNGWHNRVLVHGKDNRDKGNRTPFEAFGGDTARWDRLVAWVQASHLSAPKKRNLLREDFGEEAERELKDRNLTDTRFITKTAATLLRDRLTFHPEAPKDPVMTLNGRLTAFLRKQWGLHKNRKNGDLHHALDAAVLAVASRSFVYRLSSHNAAWGELPRGREAENGFSLPYPAFRSEVLARLCPTREEILLRLDQGGVGYDEAFRNGLRPVFVSRAPSRRLRGKAHMETLRSPKWKDHPEGPRTASRIPLKDLNLEKLERMVGKDRDRKLYEALRERLAAFGGNGKKAFVAPFRKPCRSGEGPLVRSLRIFDSGYSGVELRDGGEVYAVADHESMVRVDVYAKKNRFYLVPVYVADVARGIVKNRAIVAHKSEEEWDLVDGSFDFRFSLFPGDLVEIEKKDGAYLGYYKSCHRGDGRLLLDRHDRMPRESDCGTFYVSTRKDVLSMSKYQVDPLGEIRLVGSEKPPFVL

SEQ ID NO: 174 - protein, 1023 aa, Helicobacter cinaedi
MKIYSFDIGVASIGWAFIENEVLQDCGIRIFTKAENPKNGASLALPRREARGVRKRLARRRGRLNTIKQLLCKEFGLQLEDYLSNDGELPKAYTASKANPLKSPYELRTLALSQKLDSKDLVRVILHIAKHRGYGNKHAKDSKDTESGKVKKAIEFNRKTLAEKGYRSVGEYLYREFFQQSRISQNNGATEFINVRNKAGNYEHCVAQDMLKEELESILNAQRQFGFSLKQDFENKLLTKIFEQRPLKSFADKVGNCCFIAGEKRAPKDSPSAIEFIALSRTINTLINLSKESGEIYNRAIILQIVESTLKKGEISYKELREIIRLDERLRFKDPRLDYSREIKEAEKVKFLEFKQLKGFKKALGESFTTLAISQLDEIAEHIALIKDRVKLNEKLESYALTKEQREALSNLSFSAHINLSLQALKQILPFMRGDNGEQCLDYDESVEKAGLKALSKDTLKGQMLPPLNEFEPYLSNPVVARALAEYRKVLNVLLKQYGSPHKIHIEYAREAKLSSTERQKYEKEQKDNYAANQAAHKKCQELGLEPSSTNLLKLKLWQEQGGLCLYSGAKITISYLQDPTALQVDHIYPYSRSFDDSYMNKCLVLTKANQEKGNRTPFEAFGTDSAKWGVITTLAQKLPHKKRRRILNTAFNDKEAGFKLRNLNDTSYIARLVADYTETYLEFLPLVESENTTLSKGQKGSKKHIAIVNGVLTSTMRYYLGFASKDRDNHLHHALDAVIIGFMNDSVIKAFSDFKKTQETSKAAYYAHTLSKQEYKKQRAFIQLPSGENFRVSVLEKVESVFVSKPPRKRVRGALHEATFYSPNDPKLLKNYGGTKGVERALALGKMRKVGAKIVSNGAMVRVDIFRHKSSGKFYGVPVYTMDFALGILPNKAVVVGKDQNGVIKDWLEMDSSYEFIFSLYKDDVILVQKKEMQRPELCYFVSFDTSGASIKVAKHDNNFSTLTENQKLLFSNATKEEVVGKSIGIQNLKVFEKWQVSVLGEVKRTQSYPRENISLASKAKK

SEQ ID NO: 175 - protein, 874 aa, Listeria seeligeri
LANGQSEFSWLTRKADGEIRPWNIEEKVDFGKSAIDFIEKMTNKDTYLPKENVLPKHSMCYQKYMVYNELTKIRYTDDQGKTHYFSGQEKQQIFNDLFKQKRKVKKKDLELFLYNMNHVESPTVEGVEDAFNSSFTTYHDLQKVGVPQEILDDPLNTEMLEEIIKILTVFEDKRMINERLQEFSNVLDEAVLKKLERRHYTGWGRLSAKLLIGIRDKESHLTILDYLMNDDKHNRNLMQLINDSNLSFKSIIEKEQVSTADKDIQSIVADLAGSPAIKKGILQSLKIVDELVGIMGYPPQTIVVEMARENQTTGKGKNNSKPRFTSLEKAIKELGSQILKEHPTDNQGLKNDRLYLYYLQNGKDMYTGQELDIHNLSNYDIDHVVPQSFITDNSIDNRVLASSAANREKGDNVPSLEVVRKRKVYWEKLYQAKLMSKRKFDYLTKAERGGLTEADKARFIHRQLVETRQITKNVANILHQRFNCKKDESGNVIEQVRIVTLKAALVSQFRKQFQLYKVREVNDYHHAHDAYLNCVVANTLLKVYPQLEPEFVYGDYHQFDWFKANKATAKKQFYTNIMLFFAKKDRIIDENGEILWDKKYLDTIKKVLNYRQMNIVKKTEIQKGEFSNATANPKGNSSKLIPRKADWDPIKYGGFDGSNMAYAIVIEHEKRKKKTVIKKELIQINIMERTAFEKDQKEFLEGKGYRNPKVITKIPKYTLYECENGRRRMLGSANEAQKGNQMVLPNHLMTLLYHAKNCEASDGKSLAYIESHREMFAELLDSISEFASRYTLADANLEKINTIFEQNKSGDVKVIAQSFVNLLEFNAMGAPASFKYFETNIERKRYNNLKELLNATIIYQSITGLYEARKRLDD

SEQ ID NO: 176 - protein, 1082 aa, Neisseria lactamica
MAAFKPNPMNYILGLDIGIASVGWAMVEIDKEENPIRLIDLGVRVFERAEVPKTGDSLAMARRLARSVRRLTRRRAHRLLRARRLLKREGVLQDADFDENGLVKSLPNTPWQLRAAALDRKLTCLEWSAVLLHLIKHRGYLSQRKNEGETADKELGALLKGVADNAHALQTGDFRTPAELALNKFEKESGHIRNQRGDYSHTFSRKDLQAELNLLFEKQKEFSNPHVSDSLKEGIETLLMAQRPALSGDAVQKMLGHCTFEPAEPKAAKNTYTAERFIWLTKLNNLRILEQGSERPLTDTERATLMDEPYRKSKLTYAQARKLLGLEDTAFFKGLRYGKDNAEAPTLMEMKAYHAISRALEKEGLKDKKSPLNLSTELQDEIGTAFSLFKTDKDITGRLKDRVQPEILEALLKHISFDKFVQISLKALRRIVPLMEQGKRYDEACAEIYGDHYCKKNAEEKIYLPPIPADEIRNPVVLRALSQARKVINCVVRRYGSPARIHIETAREVGKSFKDRKEIEKRQEENRKDREKAAAKFREYFPNFVGEPKSKDILKLRLYEQQHGKCLYSGKEINLVRLNEKGYVEIDHALPFSRTWDDSFNNKVLVLGSENQNKGNQTPYEYFNGKDNSREWQEFKARVETSRFPRSKKQRILLQKFDEEGFKERNLNDTRYVNRFLCQFVADHILLTGKGKRRVFASNGQITNLLRGFWGLRKVRAENDRHHALDAVVVACSTVAMQQKITRFVRYKEMNAFDGKTIDKETGEVLHQKAHFPQPWEFFAQEVMIRVFGKPDGKPEFEEADTPEKLRTLLAEKLSSRPEAVHEYVTPLFVSRAPNRKMSGQGHMETVKSAKRLDEGISVLRVPLTQLKLKGLEKMVNREREPKLYDALKAQLETHKDNPAKAFAEPFYKYDKAGNRTQQVKAVRIEQVQKTGVWVRNHNGIADNATMVRVDVFEKGGKYYLVPIYSWQVAKGILPDRAVVAFKDEEDWTVMDDSFEFRFVLYANDLIKLTAKKNEFLGYFVSLNRATGAIDIRTHDTDSTKGKNGIFQSVGVKTALSFQKNQIDELGKEIRPCRLKKRPPVR

SEQ ID NO: 177 - protein, 1326 aa, Streptococcus pseudoporcinus
MLGTVLFDSGETAQARRLKRTNRRRYTRRRYRLCQLQNIFATEMVKVDDTFFQRLSESFFYYQDKAFDKHPIFGNSKEERAYHKTYPTIYHLRKDLADRDQKADLRLIYLALSHIIKFRGHFLIEGKLNSENTDVQKLFIALVTVYNLLFEEEPIAGETCDAKALLTAKTSKSKRLESLISEFPGQKKNGLFGNLLALALGLRPNFKSNFGLSEDAKLQITKDTYEEELDNLLAEIGDHYADLFLAAKNLSDAILLSDILTLSDENTRAPLSASMIKRYEEHQEDLALLKKLVKEQMPEKYWEIFSNAKKNGYAGYIEGKVSQEDFYRYIKPILSRLKGGDEFLAKIDRDDFLRKQRTFDNGSIPHQIHLKELHAILRRQEKYYPFLAEQKEKIEQLLCFRIPYYVGPLAKGGNSSFAWLKRRSDEPITPWNFKDVVDEEASAQAFIEGMTNYDTYLPEEKVLPKHSPLYEMFTVYNELTKVKYIAENMTKPLYLSAEQKEAIIDHLFKQTRKVTVKDLKEKYFSQIEGLENVDVTGVEGAFNASLGTYNDLLKIIKDKAFLDDEANAEILEEIVLILTLFQDEKLIEKRLAKYANLFEKSVLKKLRKRHYRGWGRLSRQLIDGMKDKASGKTILDFLKADDFANRNFIQLINDSSLDFEKLIDDAQKKAIKRESLTEAVANLAGSPAIKKGILQSLKVVDEIVKVMGHNPDNIVIEMSRENQTTAQGLKNARQRLKKIKEVHKKTGSRILEDNSERITNLTLQDNRLYLYLLQDGKDMYTGQDLDINNLSQYDIDHIIPQSFIKDNSIDNLVLTTQKANRGKSDNVPSIEVVRDMKDRVWRRQLANGAISRQKFDHLTKAERGGLADSDKARFLRRQLVETRQITKHVAQLLDSRFNSKSNQNKKLARNVKIITLKSKIVSDFRKDFGLYKLREVNNYHHAHDAYLNAVVGTALLKKYPKLEAEFVYGDYKHFDLVKLISKSDPSLGKATAKVFFYSNIMNFFKEELSLADGTLMKRPVIETNTETGEVVWDKVKDFKTIRKVLSYPQVNIVKKTEIQSGAFSKESVLSKGNSDKLIERKKGWDPKKYGGFDSPNTAYSIFVVAKVAKRKAQKLKTVKEIVGITIMEQAEYEKDNIAFLEKKGYQDIQEKLLIKLPKYSLFELENGRRRLLASANEFQKGNELALSGKYMKFLYLASRYDKLSSKIESEQQKKLFVEQHLHYFDEILDIVVKHATCYIKAENNLKKIISLYKKKEAYSINEQALNMLNLFIFTSLGAPSTFVFFDETIDRKRYTTSSDVLNGILIQQSITGLYETRIDLSRFGGD

SEQ ID NO: 178 - protein, 1150 aa, Enterococcus faecalis
MYSIGLDLGISSVGWSVIDERTGNVIDLGVRLFSAKNSEKNLERRTNRGGRRLIRRKTNRLKDAKKILAAVGFYEDKSLKNSCPYQLRVKGLTEPLSRGEIYKVTLHILKKRGISYLDEVDTEAAKESQDYKEQVRKNAQLLTKYTPGQIQLQRLKENNRVKTGINAQGNYQLNVFKVSAYANELATILKTQQAFYPNELTDDWIALFVQPGIAEEAGLIYRKRPYYHGPGNEANNSPYGRWSDFQKTGEPATNIFDKLIGKDFQGELRASGLSLSAQQYNLLNDLTNLKIDGEVPLSSEQKEYILTELMTKEFTRFGVNDVVKLLGVKKERLSGWRLDKKGKPEIHTLKGYRNWRKIFAEAGIDLATLPTETIDCLAKVLTLNTEREGIENTLAFELPELSESVKLLVLDRYKELSQSISTQSWHRFSLKTLHLLIPELMNATSEQNTLLEQFQLKSDVRKRYSEYKKLPTKDVLAEIYNPTVNKTVSQAFKVIDALLVKYGKEQIRYITIEMPRDDNEEDEKKRIKELHAKNSQRKNDSQSYFMQKSGWSQEKFQTTIQKNRRFLAKLLYYYEQDGICAYTGLPISPELLVSDSTEIDHIIPISISLDDSINNKVLVLSKANQVKGQQTPYDAWMDGSFKKINGKFSNWDDYQKWVESRHFSHKKENNLLETRNIFDSEQVEKFLARNLNDTRYASRLVLNTLQSFFTNQETKVRVVNGSFTHTLRKKWGADLDKTRETHHHHAVDATLCAVTSFVKVSRYHYAVKEETGEKVMREIDFETGEIVNEMSYWEFKKSKKYERKTYQVKWPNFREQLKPVNLHPRIKFSHQVDRKANRKLSDATIYSVREKTEVKTLKSGKQKITTDEYTIGKIKDIYTLDGWEAFKKKQDKLLMKDLDEKTYERLLSIAETTPDFQEVEEKNGKVKRVKRSPFAVYCEENDIPAIQKYAKKNNGPLIRSLKYYDGKLNKHINITKDSQGRPVEKTKNGRKVTLQSLKPYRYDIYQDLETKAYYTVQLYYSDLRFVEGKYGITEKEYMKKVAEQTKGQVVRFCFSLQKNDGLEIEWKDSQRYDVRFYNFQSANSINFKGLEQEMMPAENQFKQKPYNNGAINLNIAKYGKEGKKLRKFNTDILGKKHYLFYEKEPKNIIK

SEQ ID NO: 179 - protein, 1150 aa, Enterococcus faecalis
MYSIGLDLGVSSVGWSVIDERTGNVIDLGVRLFSAKNSEKNLERRTNRGGRRLIRRKTNRLKDAKKILAAVGFYEDKSLKNSCPYQLRVKGLTEPLSKGEIYKVTLHILKKRGISYLDEDDTEAAKESQDYKEQVRENAQLLTKYTPGQIQLQRLKENNRVKTGINAQGNYQLNVFKVSAYANELATILKTQQAFYPNELTDDWIALFVQPGIAEEAGLIYRKRPYYHGPGNEANNSPYGRWSDFKKTGQPATNIFDKLIGKDFQGELRASGLSLSAQQYNLLNDLTNLKIDGEIPLSPEQKEYILAELMTKEFTRFGINDVAKLLGVKKERLSGWRLDKKGKPEIHTLKGYRNWRKIFAESGIDLATLPTETIDCLAKVLTLNTEREGIENTLAFELPELAESVKLLVLDRYKELSQSVSTQAWHRFSLKTLHLLIPELMNATSEQNTLLEQFQLKSDVRKRYSEYKKLPTKDVLTEIYNPTVNKTVSQAFKVIDALLVKYGKEQIRYITIEMPRDDNEEDEKKRIKELHAKNSQRKNDSQSYFMQKSGWSQEKFQTTIQKNRRFLAKLLYYYEQDGICAYTGLSISPELLVSDSTEIDHIIPISISLDDSINNKVLVLSKANQVKGQQTPYDAWMDGSFKKINGKFSNWDDYQKWVESRHFSHKKENNLLETRNIFDSEQVEKFLARNLNDTRYASRLVLNTLQSFFANQETKVRVVNGSFTHTLRKKWGADLDKTRETHHHHAVDATLCAVTPFVKVSRYHYAVKEETGEKVMREIDFETGEIVDEMSYREFKKSKKYERKTYQVKWPNFREQLKPVNLHPRIKFSHQVDRKANRKLSDATIYSVREKTEVKTLKSGKQKITTDEYTIGKIKDIYTVDGWEAFKKKQDKLLMKDLDEKTYERLLSIAETTPDFQEVEEKNGKVKRVKRSPFAVYCEENDIPAIRKYAKNNNGPLIRSLKYYDGKLNKHINITKDSQGRPVEKTKNGRKVTLQSLKPYRYDIYQDLETKAYYTVQLYYSDLRFVEGKYGITEKEYMKKVAEQTKGQVVRFCFSLQKNDGLEIEWKDSQCYDVRFYNFQSANSINFKGLEQEMMPAENQFKQKPYNNGAINLNIAKYGKEGKKLRKFNTDILGKKHYLYYEKEPKNIIK

SEQ ID NO: 180 - protein, 1345 aa, Streptococcus anginosus
MDQKYSIGLDIGTNSVGWAVVTDDYKVPAKKMKVLGNTDKQSIKKNLLGALLFDSGETAEATRLKRTARRRYTRRRNRLRYLQEIFAEEMNKVDENFFQRLDDSFLVDEDKRGERHPIFGNIAAEVKYHDDFPTIYHLRKHLADISQKADLRLVYLALAHMIKFRGHFLIEGQLKAENTNVQALFKDFVEVYDKTVEESHLSEMTVDALSILTEKVSKSRRLENLIAHYPAEKKNTLFGNLIALSLGLQPNFKTNFQLSEDAKLQFSKDTYEEDLEGLLGEIGDEYADLFASAKNLYDAILLSGILTVDDNSTKAPLSASMVKRYEEHQKDLKKLKDFIKVNAPDQYNAIFKDKNKKGYAGYIENGVKQDEFYKYLKGILLQINGSGDFLDKIDREDFLRKQRTFDNGSIPHQIHLQEMHAILRRQEEHYPFLKENQDKIEKILTFRIPYYVGPLARKGSRFAWAEYKADEKITPWNFDDILDKEKSAEKFITRMTLNDLYLPEEKVLPKHSLLYETFTVYNELTKVKYVNEQGEAKFFDANMKQEIFDHVFKENRKVTKDKLLNYLNKEFEEFRIVNLTGLDKENKAFNSSLGTYHDLRKILDKSFLDDKANEKTIEDIIQTLTLFEDREMIRQRLQKYSDIFTKAQLKKLERRHYTGWGRLSYKLINGIRNKENKKTILDYLIDDGYANRNFMQLINDDALSFKEEIARAQIIGDVDDIANVVHDLPGSPAIKKGILQSVKIVDELVKVMGHNPANIIIEMARENQMTDKGRRNSQQRLKLLQDSLKNLDNPVNIKNVENQQLQNDRLFLYYIQNGKDMYTGETLDINNLSQYDIDHIIPQAFIKDNSLDNRVLTRSDKNRGKSDDVPSIEVVHEMKSFWSKLLSVKLITQRKFDNLTKAERGGLTEEDKAGFIKRQLVETRQITKHVAQILDERFNTEFDGNKRRIRNVKIITLKSNLVSNFRKEFELYKVREINDYHHAHDAYLNAVVGNALLLKYPQLEPEFVYGEYPKYNSYRSRKSATEKFLFYSNILRFFKKEDIQTNEDGEIAWNKEKHIKILRKVLSYPQVNIVKKTEEQTGGFSKESILPKGESDKLIPRKTKNSYWNPKKYGGFDSPVVAYSILVFADVEKGKSKKLRKVQDMVGITIMEKKRFEKHPVDFLEQRGYRNVRLEKIIKLPKYSLFELENKRRRLLASARELQKGNELVIPQRFTTLLYHSYQIEKNYEPEHREYVEKHKDEFKELLEYISVFSRKYVLADNNLTKIEMLFSKNKDAEVSSLAKSFISLLTFTAFGAPAAFNFFGENIDRKRYTSVTECLNATLIHQSITGLYETRIDLSKLGED

SEQ ID NO: 181 - protein, 849 aa, Listeria ivanovii
  misc_feature (780)..(780): Xaa can be any naturally occurring amino acid
LIDKNGTPQHITMIDKMRGKCTYFPEEVRIAKMSYTAELFGLLNDFNNIYFADPETGEKIGFTEADKKYFIDTFIHDQKGVKNITLKQIMKHKNIINETDIFGYRINTKNGTPIFTEFKGLKALKKALKEVDLPDEFYQNTEMMDEIANILSSEKSFTRREEQLKELFLAAFNDELEEAVKELINDITFKEFHSLSKKAIMVILPELWSTNQNQMQLFVQHKMDKSRLENLQNGTKIQFDDEAILSTIAKRAHRETIKIVDAVRAKYGELDYVIVEMAREKNSDEQKKVYNRAQKKQGDFEKEMCKLLGVSELKELRLNGKQHLALKFWKEQDGKCIYSGKPIALSDIVNNFNGLLEIDHIIPISISYDDSQQNKVLCLRSENQRKGQLSPYQYLIRGMGERSFDAFKAEVLSRHFGKKKQNYLLEMEDIANNDELRKHFINRNLVDTRYAMRTFSNTLKTFYTVNGIPTKVMPVNGAMTSALRKRAKLNKDRDAGHAHHAIDALIVAAIGRLPLIKQLAELRVNEEGEFADKITDKGLDDKTAFDDKTLKFLRNLLNYESKVKYSHKVDRKPNRSLSKQTLYSTREKDGEKYIIGKVKNIYTLDKAGYAALKKRIDKNPEDFLMAQHNPKTWEEIIKIMEVYSKADNPFKEFYDEHGFIMKDGKVPVKSLRYHDKKLGIHVPLTHKYENTRHDVVLLKRNSLRVDIYMNKEGVYKYQGVPYNWFNQKGDKYILDMEKYHNEIDGTRASFKNIDNTFEFQFSLYKNDVFSYMKKDKEGEXVSYTKLFRSDSSPRENRLEVENIDMRTSSQQMPTINPLKNLIKYNTDILGNTYPIQKEKFVTVFTLHSK

SEQ ID NO: 182 - protein, 1457 aa, Prevotella buccae
MKTILGLDLGTNSIGWAKVSVDDYGNYLHDIKLGSRIIPMSQDVLGNFDSGVTVSQTAQRTEFRSKRRLVQRNLQRRERLHRVLHVLDFLPAHYDAAIGWDRTEAVTYGKFLNHAEPKLAWEELGNGKRRFLFMDSFHEMVADFARCQPALVADGKKIPLDWTIYYLRKKALTQAITKEELAWILLNFNQKRGYYQLRGEEEEENPTKQEEYYELKVVSVEATDSRKGNDTWYNVHLENGWIYRRSSKISLDDWVGKVKQFIVTTEYEKDGATLKTDKEGYVKRSFRAPNENDWGLRKKRTETLLEMSGKTVGAFIYDHLLQEPADKIRGNFIRTIERHYYKAELEAILAEQCKYHIELRDKEMLEACARELYLNNLPHQRSLMKKDMTYLLLYDLIFYQRPLKSKKALIANCPYEYYEYVDKETGEIKRQNIKCIAKSNPYFQEFRLWQFVLNLRLFDRVEDKEVTANYLPTADDHARLFTYLNDRKEINQETLLKDYFKLKKVKIGNEKEYPIRWNYIEDKEKKYPCNETRYELLMALDRAGIEHKWLDDNNLEYRLWHLLYSVEVKSESETALRKLKNDDAFVNSFLKVKPFKKEYGAYSEKAIKRLLAVMRKGFLWNEQDICDETRKRIEIIIKGDVDEKVKERMGHAAYSFDRVSDFQGLPEWLACYVVYGRHSEAMDIQHWDSPERLMAYINNFKQYSLRNPIVEQCILETLRTVHDIWKETGQIDEIHVELGREMKSTSEERARRTQNVLRNENTNLRIKSLLIELKNDTDICNVHPYSPMQQEILRIYEEGALQELNREDEDFEEISKISQMSQPSGKELNRYKLWLEQKYRSPYTGKAISLAKLFTPAYQIEHVIPQSRYFDDSFTNKVICEAEVNTLKSNLLGYEFIKKHGGEIIHCTTLGDVRIFSESEYKAFVMDHYANNKSKKDKLLMEDIPQEFLSRQMNDSRYISKVVKTLLSNIVRMADESEATSKSVIVCTGGVTDRLKKDWGLNDVWNSIVYSRFERLNRLTGTEAFGHWENKDGKRVFQTSMPLELQRGFRKKRIDHRHHAMDALVIACASRNIVNYLNNESANNPKKREDLRRQLCDKNRVIRKPWETFTQDAYNALENVVVSFKNYVRVINKATNRYEHYDENGKKRFVQQKGSELWAIRKPMHKETYYGHVNLRRKELVTLQKALDDIPSICDKKLRDYISALVEKHFNKRQLLAHFKSTDYYWQKQYVNKVYVWTFSDDIKPLVATRKLLDTSFDAKRIGTITDTGIQKILRNYLEAKGGNATLAFTPEGIAEMNQNISKYNDGKPHQPILKVRITEPMGAKYRVGQTGNKMAKYVEAQSGTNLYFAIYEDSEGKRSYTTVPLDEVAERLKQRLSPVPEKDENDVPLKFYLSPNDLVYVPTEEELQLRECKLNKDRIYKMVSSTGNECHFIPYYVANVIYNKGGFNMQMHRPQS

SEQ ID NO: 183 - protein, 1330 aa, Enterococcus italicus
MKNDYTIGLDIGTNSVGYSVVTDDYKVISKKMNVFGNTEKKSIKKNFWGVRLFESGQTAQEARMKRTSRRRIARRKNRICYLQEIFQPEMNHLDNNFFYRLNESFLVADDAKYDKHPIFGTLDEEIHFHEQFPTIYHLRKYLADGDEKADLRLVYLAIAHIIKFRGNFLIEGELNTENNSVIELSKVFVQLYNQTLSELEGFQFIDESIDFSEVLTQQLSKSERADNVLKLFPDEKGTGIFAQFIKLIVGNQGNFKKVFQLEEDQKLQLSTDDYEENIENLLAIIGDEYGDIFVAAQNLYQAILLAGILTSTEKTRAKLSASMIQRYEEHAKDLKLLKRFVKEHIPDKYAEIFNDATKNGYAGYIDGKTKEEEFYKYLKTTLVQKSGYQYFIEKIEQENFLRKQRIYDNGVIPHQVHAEELRAILRKQEKYYSFLKENHEKIEQIFKVRIPYYVGPLAKHNEQSRFAWNIRKSDEPIRPWNMNDVVDENASAVAFIERMTIKDIYLNENVLPRHSLIYEKFTVFNELTKVLYADDRGVFQRFSAEEKEDIFEKLFKSERKVTKKKLENYLRIELSISSPSVKGIEEQFNANFGTYLDLKKFDELHPYLDDEKYQDTLEEVIKVLTVFEDRSMIQNQLEQLPLNLSTKTIKALSRRKYTGWGRLSARLIDGIHDKNSGKTILDYLIEDESDSYIVNRNFMQLINDDHLSFKKIIEDSQPYKEQQSAEEIVSELSGSPAIKKGILQSLKIVDELVAIMGYKPKNIVVEMARENQTTGRGKQNSKPRLKGIENGLKEFSDSVLKGSSIDNKQLQNDRLYLYYLQNGKDMYTGHELDIDHLSTYDIDHIIPQSFLTDNSIDNRVLTTSKSNRGKSDNVPSEEVVRKMDRFWRKLLNAKLISERKYTNLTKKELTESDKAGFLKRQLVETRQITKHVATILDSKFNEDSNNRDVQIITLKSALVSEFRKTFNLYKVREINDLHHAHDAYLNAVVALSLLRVYPQLKPEFVYGEYGKNSIHDQNKATIKKQFYSNITRYFASKDYIINDDGEILWNKQETIAQVIKTLGMHQVNVVKKVEIQKGGFSKESIQPKGESQKLIRRKQQWNTKKYGGFDSPVVAYAILLSFDKGKRKARSFKIVGITIQDRESFEGNPILYLSKKDYHNPKVEAILPKYSLFEFENGRRRMVASASETQKGNQLIIPGHLMELLYHSKKIINGKNSDSVSYIQNNKEKFREIFEYIVDFSSKYISADANLNKIEKIFENNFHKASEQEIAKSFINLLTFTAMGAPADFEFFGEKIPRKRYVSISEIIDAVFIHQSITGLYETRVRLTEV

SEQ ID NO: 184 - protein, 1123 aa, Mobiluncus curtisii
MFVYLNSPRGFGPATFLTDLPHFCIIFGNNDFMDNRKYHVGIDVGTNSVGFAAVEVGDSGSPIRFLNTMVVIHDSGVDPEQKKYAITRLASAGTARRTRRLYRTRRQRLRELDDFISNELGYPLVNLENFADPYEPWKVRADLATIKLPADELPEAMSIALRHMARHRGWRSPYQRVEALHLHAEISEEFSALKKRVMEKTGDVFSDDATPAEVLVDLMGRQKIRGADGMLSGKLRQSDNANELRKIASVQGIDDETLNRIIDRVFFSRSPKGKASERVGMDALPGQGSKPRALKAMPSFQKFRIVSVICNLRIKDSGDDNRPLSMEEKEQLIGYLMSSTTDDHVTWTDVAELLHVKRSNLQGTAKEGPDGERPYTRPPVNSAWSKIKDSKIKSLVALWKTGDVDVQSAIVEALSNASVLEDARPGADIVVAYLESLDDKELESLDKVGLPAGRASYSEDSLERLTERMLQDDCDLFEARKREFGVSDDWKPPADPIYAPVGNPGVDRVLKIVNRLLMAAEREWGAPTQINIEHVRSGFSSELMQREFERENERRRAQNEEAVKAILTEKGGNSHVSKYDIIRYYAVKRQNCQCLYCGTPITFSDCELDHIVPRKGVGSTNSRVNLAAACRSCNRDKSNLPFAVWAGKTSNFDVSIDGAVSRVKQWQRSQNEGAREFRAFQNEVISRLLKTTEDPEIDSRSLESVAWMARELHHRVEYYFQSKGAQTQVSVYRGAVTAQARKSSGLEDKVKMIGGGGKTRLDRRHHAMDAATIALMTPGISTTLSEKNNLRDAQKFTGQSETWKDYCGRTETAREHFAVWKSNMERLTDLFNDKLENDAIPVVQPLRLRLSDSKAHDDGIGKLDSKKLGSVWSLADIDRAATPQIWTALTRCDDFDPTKGLPENANRVIRAQGVKYESEDNIPVFPSNVAAIAVRDGYAEIGSTIHHARIYRIDDGKKIFYSMIRVFAVDLLKHQAEDLFTVKLPPSAISIRTCEDSLRRALSNGTAEYLGWLVPGDEIIVDTSDKAFHTGQIGDLLRNFPVNSFRLTGFPSNSRLRLKPVLLAGEGLRDDAEDSIKKILSGQGWRPAINVLFSKGKPRIVRRNSLGIERPSSNNGLPFSWEA

SEQ ID NO: 185 - protein, 1054 aa, Staphylococcus lugdunensis
MNQKFILGLDIGITSVGYGLIDYETKNIIDAGVRLFPEANVENNEGRRSKRGSRRLKRRRIHRLERVKKLLEDYNLLDQSQIPQSTNPYAIRVKGLSEALSKDELVIALLHIAKRRGIHKIDVIDSNDDVGNELSTKEQLNKNSKLLKDKFVCQIQLERMNEGQVRGEKNRFKTADIIKEIIQLLNVQKNFHQLDENFINKYIELVEMRREYFEGPGKGSPYGWEGDPKAWYETLMGHCTYFPDELRSVKYAYSADLFNALNDLNNLVIQRDGLSKLEYHEKYHIIENVFKQKKKPTLKQIANEINVNPEDIKGYRITKSGKPQFTEFKLYHDLKSVLFDQSILENEDVLDQIAEILTIYQDKDSIKSKLTELDILLNEEDKENIAQLTGYTGTHRLSLKCIRLVLEEQWYSSRNQMEIFTHLNIKPKKINLTAANKIPKAMIDEFILSPVVKRTFGQAINLINKIIEKYGVPEDIIIELARENNSKDKQKFINEMQKKNENTRKRINEIIGKYGNQNAKRLVEKIRLHDEQEGKCLYSLESIPLEDLLNNPNHYEVDHIIPRSVSFDNSYHNKVLVKQSENSKKSNLTPYQYFNSGKSKLSYNQFKQHILNLSKSQDRISKKKKEYLLEERDINKFEVQKEFINRNLVDTRYATRELTNYLKAYFSANNMNVKVKTINGSFTDYLRKVWKFKKERNHGYKHHAEDALIIANADFLFKENKKLKAVNSVLEKPEIESKQLDIQVDSEDNYSEMFIIPKQVQDIKDFRNFKYSHRVDKKPNRQLINDTLYSTRKKDNSTYIVQTIKDIYAKDNTTLKKQFDKSPEKFLMYQHDPRTFEKLEVIMKQYANEKNPLAKYHEETGEYLTKYSKKNNGPIVKSLKYIGNKLGSHLDVTHQFKSSTKKLVKLSIKPYRFDVYLTDKGYKFITISYLDVLKKDNYYYIPEQKYDKLKLGKAIDKNAKFIASFYKNDLIKLDGEIYKIIGVNSDTRNMIELDLPDIRYKEYCELNNIKGEPRIKKTIGKKVNSIEKLTTDVLGNVFTNTQYTKPQLLFKRGN

SEQ ID NO: 186 - protein, 586 aa, Pseudoramibacter alactolyticus
MTYYLGLDMGTGSVGWAATDKNYKLIRAKGKDLWGVRLFQTAKTAAERRSHRVARLRRQREKVRIGYLKTIFSDAINKVDPGFFQRLDDSFFYAEDKNINQPYALFADTGYTDVDYYRDYPTIFHLRSTLIHDTSPKDVRLVYLAVLNMFKHRGHFLASNLSENGVDDFGDIYQQWCKSVPKPVQISDPEAKTEKIENILSKAGISNTRRLEALLEVFGIKRRDAFAEVLKLWCGLKGNLSKIWSETDFSDLDNTKPALSFKDSNLDMVLSQLEEILPDEDYSWLMLTKQIYDWSLLSGMMKDASGKSYDYLSDARVASYQKHSEDLKTLKRFYHDNHLSAAYDQMFRVMGKDNYSAYAGSVQSKKEVVRRGASCGIEELYKRIKKDLKPVPDCETKQIILENIERGTFLPKQLTRDNGVIPNQIHVHELKAILKNAENYLPFLKEGSELTNSEKILQLFQFQIPYYVGPLYSDENNYAWVVRKEGGRVFPWNFAEKVDEKASAEGFISELVARCTYLDNEKVLPKASLLYEKFMVLNELNNLRINGERISVDIKQELYQNLFTRGKKVTLKKSEGLFGGQRIFCL

SEQ ID NO: 187 - protein, 1385 aa, Gemella morbillorum
MKNKTWYLGLGVGPTSIGWAATDSNYKLLRKNKKRLWGVRLFEEAKTAVDRRTFRAERRRLARRKWRISLLEELFAKEVSKNDPNFFLRLKESKYHFEDKSLMNEYILFNDKDYTDKDYYKEYPTIYHLRLSLTTEENPDIRKVYLAVHSMLKNRGHFLLQGQSFNDSNIDSVIKELLELETVKINFEVTDEVIHSLKKIALEKKNLSDKNNDVKKLYPKEKQLQEIFKLVFGGKTSLDKLYDIEEYKELDNSVKSISFKEKVYEEVRPDYEQILSNYIELLDLAKLVYDSIVLADIKKEGKTISESKVELYNKHKDDLANLKKLVKIDSKLSEDKKKEVYFTIFKEDKEKGTNYVNYTHRSQEGKSCSYEDFKKFLKKELEKLEDSPTKTTILEELDLETFLPLQRTKDNSVVPYQIHKEELVKILDNAAKYHSFLAEKDDSGYSTREKVVQLFEFRIPYYIGPLNAHHNTENGGYSWAIRKKGMESVPVTPWNFKDVIDESASAEAFVNNLKNKCAYLSGEDVLPKNSLLYSEYALLNELNALRYEGNRISVEARDVIVTKLFKEQGKKVTKKTIKELLKTEGFIDGKGEIVGIDNIVKNDLKSYRDFKKILADKFDKERVENIILWITLYGESRKLIKEKITKVYGDFYTVDEIEKMSRLTYKDWGILSRKLLTELVSEKLYNEETGECLNIIGAMRQGTILFMELLADKFDYMSQIKNHNKENKDDITEITPDILENLHASPAVKRSIWQTVRIVEELKTIIGCVPTKIFIETTKRNNAPYKVPTLNRNDLVTKYKTIREHEIFELEKELKNTLDFTLNKNRLINEEPSKLKATKLYLYYTQLGRCMYTGKKIDLGELFDNNNKYDIDHIYPQSKVKDGSFNNIVLVTKASNDMKADVFPLKSKFQTKENKIFWRFLKEKKLITEEKYNRLVRTEEFSNGELTGFITRQLVETSQAIKVISNVLRELNPETTICYSKAENVSSFRQSFGKIKEANRKAENNEKLIRVQEINDYYNAKDAYLSIVVGNVYDVKFTRNVHNFIKNNKDARRYSLNGLFYTDVKNANTIAWEMDKTVHVVEKTMNNNNILITRRTSEQKGALYDATLYKAKVAEKAKEGTYYPLKTTDSKIKDVGKYGGFTKIKIAYYSIFEYTLDGKKGKQKITRIVPIPIYISQNIKDDKALLEYAQTRLPGKDLKIKYRKLCIGSLVKINNFNYYIGGKTNNNFTFDSAVQVILDKDSESYIKELAKYLNWKKENKDGKLWESITEDKNIQLYDSLVKKMNTGIFIRKTPNKYTELLTLEVKNKFINIDIDEQVKLLLEILNLLTNKKFTSKLNEIGITASRGVCSFNLSNQSQFSIIEQSVTGVYEKEKLIIEKKKEGIL

SEQ ID NO: 188 - protein, 1029 aa, Alicycliphilus denitrificans
MRSLRYRLALDLGSTSLGWALFRLDACNRPTAVIKAGVRIFSDGRNPKDGSSLAVTRRAARAMRRRRDRLLKRKTRMQAKLVEHGFFPADAGKRKALEQLNPYALRAKGLQEALLPGEFARALFHINQRRGFKSNRKTDKKDNDSGVLKKAIGQLRQQMAEQGSRTVGEYLWTRLQQGQGVRARYREKPYTTEEGKKRIDKSYDLYIDRAMIEQEFDALWAAQAAFNPTLFHEAARADLKDTLLHQRPLRPVKPGRCTLLPEEERAPLALPSTQRFRIHQEVNHLRLLDENLREVALTLAQRDAVVTALETKAKLSFEQIRKLLKLSGSVQFNLEDAKRTELKGNATSAALARKELFGAAWSGFDEALQDEIVWQLVTEEGEGALIAWLQTHTGVDEARAQAIVDVSLPEGYGNLSRKALARIVPALRAAVITYDKAVQAAGFDHHSQLGFEYDASEVEDLVHPETGEIRSVFKQLPYYGKALQRHVAFGSGKPEDPDEKRYGKIANPTVHIGLNQVRMVVNALIRRYGRPTEVVIELARDLKQSREQKVEAQRRQADNQRRNARIRRSIAEVLGIGEERVRGSDIQKWICWEELSFDAADRRCPYSGVQISAAMLLSDEVEVEHILPFSKTLDDSLNNRTVAMRQANRIKRNRTPWDARAEFEAQGWSYEDILQRAERMPLRKRYRFAPDGYERWLGDDKDFLARALNDTRYLSRVAAEYLRLVCPGTRVIPGQLTALLRGKFGLNDVLGLDGEKNRNDHRHHAVDACVIGVTDQGLMQRFATASAQARGDGLTRLVDGMPMPWPTYRDHVERAVRHIWVSHRPDHGFEGAMMEETSYGIRKDGSIKQRRKADGSAGREISNLIRIHEATQPLRHGVSADGQPLAYKGYVGGSNYCIEITVNDKGKWEGEVISTFRAYGVVRAGGMGRLRNPHEGQNGRKLIMRLVIGDSVRLEVDGAERTMRIVKISGSNGQIFMAPIHEANVDARNTDKQDAFTYTSKYAGSLQKAKTRRVTISPIGEVRDPGFKG

SEQ ID NO: 189 - protein, 1422 aa, Sutterella wadsworthensis
MTQSERRFSCSIGIDMGAKYTGVFYALFDREELPTNLNSKAMTLVMPETGPRYVQAQRTAVRHRLRGQKRYTLARKLAFLVVDDMIKKQEKRLTDEEWKRGREALSGLLKRRGYSRPNADGEDLTPLENVRADVFAAHPAFSTYFSEVRSLAEQWEEFTANISNVEKFLGDPNIPADKEFIEFAVAEGLIDKTEKKAYQSALSTLRANANVLTGLRQMGHKPRSEYFKAIEADLKKDSRLAKINEAFGGAERLARLLGNLSNLQLRAERWYFNAPDIMKDRGWEPDRFKKTLVRAFKFFHPAKDQNKQHLELIKQIENSEDIIETLCTLDPNRTIPPYEDQNNRRPPLDQTLLLSPEKLTRQYGEIWKTWSARLTSAEPTLAPAAEILERSTDRKSRVAVNGHEPLPTLAYQLSYALQRAFDRSKALDPYALRALAAGSKSNKLTSARTALENCIGGQNVKTFLDCARRYYREADDAKVGLWFDNADGLLERSDLHPPMKKKILPLLVANILQTDETTGQKFLDEIWRKQIKGRETVASRCARIETVRKSFGGGFNIAYNTAQYREVNKLPRNAQDKELLTIRDRVAETADFIAANLGLSDEQKRKFANPFSLAQFYTLIETEVSGFSATTLAVHLENAWRMTIKDAVINGETVRAAQCSRLPAETARPFDGLVRRLVDRQAWEIAKRVSTDIQSKVDFSNGIVDVSIFVEENKFEFSASVADLKKNKRVKDKMLSEAEKLETRWLIKNERIKKASRGTCPYTGDRLAEGGEIDHILPRSLIKDARGIVFNAEPNLIYASSRGNQLKKNQRYSLSDLKANYRNEIFKTSNIAAITAEIEDVVTKLQQTHRLKFFDLLNEHEQDCVRHALFLDDGSEARDAVLELLATQRRTRVNGTQIWMIKNLANKIREELQNWCKTTNNRLHFQAAATNVSDAKNLRLKLAQNQPDFEKPDIQPIASHSIDALCSFAVGSADAERDQNGFDYLDGKTVLGLYPQSCEVIHLQAKPQEEKSHFDSVAIFKEGIYAEQFLPIFTLNEKIWIGYETLNAKGERCGAIEVSGKQPKELLEMLAPFFNKPVGDLSAHATYRILKKPAYEFLAKAALQPLSAEEKRLAALLDALRYCTSRKSLMSLFMAANGKSLKKREDVLKPKLFQLKVELKGEKSFKLNGSLTLPVKQDWLRICDSPELADAFGKPCSADELTSKLARIWKRPVMRDLAHAPVRREFSLPAIDNPSGGFRIRRTNLFGNELYQVHAINAKKYRGFASAGSNVDWSKGILFNELQHENLTECGGRFITSADVTPMSEWRKVVAEDNLSIWIAPGTEGRRYVRVETTFIQASHWFEQSVENWAITSPLSLPASFKVDKPAEFQKAVGTELSELLGQPRSEIFIENVGNAKHIRFWYIVVSSNKKMNESYNNVSKS

SEQ ID NO: 190 - protein, 1132 aa, Nitratifractor salsuginis
MKKILGVDLGITSFGYAILQETGKDLYRCLDNSVVMRNNPYDEKSGESSQSIRSTQKSMRRLIEKRKKRIRCVAQTMERYGILDYSETMKINDPKNNPIKNRWQLRAVDAWKRPLSPQELFAIFAHMAKHRGYKSIATEDLIYELELELGLNDPEKESEKKADERRQVYNALRHLEELRKKYGGETIAQTIHRAVEAGDLRSYRNHDDYEKMIRREDIEEEIEKVLLRQAELGALGLPEEQVSELIDELKACITDQEMPTIDESLFGKCTFYKDELAAPAYSYLYDLYRLYKKLADLNIDGYEVTQEDREKVIEWVEKKIAQGKNLKKITHKDLRKILGLAPEQKIFGVEDERIVKGKKEPRTFVPFFFLADIAKFKELFASIQKHPDALQIFRELAEILQRSKTPQEALDRLRALMAGKGIDTDDRELLELFKNKRSGTRELSHRYILEALPLFLEGYDEKEVQRILGFDDREDYSRYPKSLRHLHLREGNLFEKEENPINNHAVKSLASWALGLIADLSWRYGPFDEIILETTRDALPEKIRKEIDKAMREREKALDKIIGKYKKEFPSIDKRLARKIQLWERQKGLDLYSGKVINLSQLLDGSADIEHIVPQSLGGLSTDYNTIVTLKSVNAAKGNRLPGDWLAGNPDYRERIGMLSEKGLIDWKKRKNLLAQSLDEIYTENTHSKGIRATSYLEALVAQVLKRYYPFPDPELRKNGIGVRMIPGKVTSKTRSLLGIKSKSRETNFHHAEDALILSTLTRGWQNRLHRMLRDNYGKSEAELKELWKKYMPHIEGLTLADYIDEAFRRFMSKGEESLFYRDMFDTIRSISYWVDKKPLSASSHKETVYSSRHEVPTLRKNILEAFDSLNVIKDRHKLTTEEFMKRYDKEIRQKLWLHRIGNTNDESYRAVEERATQIAQILTRYQLMDAQNDKEIDEKFQQALKELITSPIEVTGKLLRKMRFVYDKLNAMQIDRGLVETDKNMLGIHISKGPNEKLIFRRMDVNNAHELQKERSGILCYLNEMLFIFNKKGLIHYGCLRSYLEKGQGSKYIALFNPRFPANPKAQPSKFTSDSKIKQVGIGSATGIIKAHLDLDGHVRSYEVFGTLPEGSIEWFKEESGYGRVEDDPHH

SEQ ID NO: 191 - protein, 1327 aa, Solobacterium moorei
MEGQMKNNGNNLQQGNYYLGLDVGTSSVGWAVTDTDYNVLKFRGKSMWGARLFDEASTAEERRTHRGNRRRLARRKYRLLLLEQLFEKEIRKIDDNFFVRLHESNLWADDKSKPSKFLLFNDTNFTDKDYLKKYPTIYHLRSDLIHNSTEHDIRLVFLALHHLIKYRGHFIYDNSANGDVKTLDEAVSDFEEYLNENDIEFNIENKKEFINVLSDKHLTKKEKKISLKKLYGDITDSENINISVLIEMLSGSSISLSNLFKDIEFDGKQNLSLDSDIEETLNDVVDILGDNIDLLIHAKEVYDIAVLTSSLGKHKYLCDAKVELFEKNKKDLMILKKYIKKNHPEDYKKIFSSPTEKKNYAAYSQTNSKNVCSQEEFCLFIKPYIRDMVKSENEDEVRIAKEVEDKSFLTKLKGTNNSVVPYQIHERELNQILKNIVAYLPFMNDEQEDISVVDKIKLIFKFKIPYYVGPLNTKSTRSWVYRSDEKIYPWNFSNVIDLDKTAHEFMNRLIGRCTYTNDPVLPMDSLLYSKYNVLNEINPIKVNGKAIPVEVKQAIYTDLFENSKKKVTRKSIYIYLLKNGYIEKEDIVSGIDIEIKSKLKSHHDFTQIVQENKCTPEEIERIIKGILVYSDDKSMLRRWLKNNIKGLSENDVKYLAKLNYKEWGRLSKTLLTDIYTINPEDGEACSILDIMWNTNATLMEILSNEKYQFKQNIENYKAENYDEKQNLHEELDDMYISPAARRSIWQALRIVDEIVDIKKSAPKKIFIEMAREKKSAMKKKRTESRKDTLLELYKSCKSQADGFYDEELFEKLSNESNSRLRRDQLYLYYTQMGRSMYTGKRIDFDKLINDKNTYDIDHIYPRSKIKDDSITNRVLVEKDINGEKTDIYPISEDIRQKMQPFWKILKEKGLINEEKYKRLTRNYELTDEELSSFVARQLVETQQSTKALATLLKKEYPSAKIVYSKAGNVSEFRNRKDKELPKFREINDLHHAKDAYLNIVVGNVYDTKFTEKFFNNIRNENYSLKRVFDFSVPGAWDAKGSTFNTIKKYMAKNNPIIAFAPYEVKGELFDQQIVPKGKGQFPIKQGKDIEKYGGYNKLSSAFLFAVEYKGKKARERSLETVYIKDVELYLQDPIKYCESVLGLKEPQIIKPKILMGSLFSINNKKLVVTGRSGKQYVCHHIYQLSINDEDSQYLKNIAKYLQEEPDGNIERQNILNITSVNNIKLFDVLCTKFNSNTYEIILNSLKNDVNEGREKFSELDILEQCNILLQLLKAFKCNRESSNLEKLNNKKQAGVIVIPHLFTKCSVFKVIHQSITGLFEKEMDLLK

SEQ ID NO: 192 - protein, 738 aa, Treponema phagedenis
MLQELFAKEIAKIDEGFFRRLDESAFYLEDKSLKQKYSLFNDDNFTDKDYYKKFPTIHHLIKALINDETHVDIRLLYLACHTIIKNRGHFLFEGKEFNTESRFDDAINELFSYLRQDMEIDFAFEDKIADIKEILENKKIGMRDKQNALNKKLSIAPKDKQKKEIIKLIVGASFNLKTLFNDEKYSSEKESYSFAKSNYEEKEAVLESLLGDGFGLILRAKAVYDSSVLSEILGNETYLSFAKVKIYDKHKEDLAKLKKVIKTYHADEFKKVFAEANIQGNYCSYVGSCKKNGKKVPIEKRADKDAFYDFLKKILKDEKAKNSDADYAFILNEIELKTFLPKQVSKKNANIPYQLRRMELEKIVNNAEKYFSFLSEKDEYGTVKEKIIQLLTFKRPYYIGIIQDTHKEKFPDRCWVVKKENAKNEKITPWNFYDHIDEDKTAEAFITSRTNKCTYLIGEDVLPRNSLLYMEYTVLNELNNLKVSVDGVNIFDVKLKKKIYEQVFKQRKEVSKKTIADFLKKEGICKKENDVVITGIDEKCTTSLKLYIDIKKIIGKRIEEEPTKNALEDIILWASIYDEGEGRKILEAKIQSVYPDVFTQDELNKILKLKISGWGRFSRKFLESIVASFPGFTDTINIITAMRETNFNLMELLGDAYGFSKGIEKFNSKFNDDKKVFSYDKLVKDLYLSPSVKRMLWRALVIVKEVKSIMGKDPKKYLLKWQEEKKLKREGLPPAMQV

SEQ ID NO: 193 - protein, 1377 aa, Streptococcus equinus
MEKTYSIGLDIGTNSVGWAVITDDYKVPAKKMKVLGNTDKKYIKKNLLGALLFDSGETAEATRLKRAARRRYTRRKNRLRYLQEIFAKEMAKVDESFFQRLEESFLTDDDKTFDSHPIFGNKAEEDTYHQEFPTIYHLRKHLADSPEKVDLRLVYLALAHMIKFRGHFLIEGQLNAENTDVQKIFADFVGVYDRTFDDSHLSEITVDAASILTEKISKSRRLENLIKQYPTEKKNTLFGNLVALALGLQPNFKTNFKLSEDAKLQFSKDTYDEDLEELLGKIGDDYADLFTAAKNLYDAILLSGILTVDDNSTKAPLSASMIKRYEEHHEDLEKLKTFIKVNNFDKYHEIFKDKSKNGYAGYIENGVKQDIFYKHLKSIISEKNGGQYFLDKIEREDFLRKQRTFDNGSIPYQIHLQEMRTILRRQGEYYPFLKENQAKIEKILTFRIPYYVGPLARKNSRFAWAKYHSDEPITPWNFDEVVDKEKSAEKFITRMTLNDLYLPEEKVLPKHSYVYETFAVYNELTKIKYVNEQGKSFFFDANMKQEIFDHVFKENRKVTKAKLLSYLNNEFEEFRINDLIGLDKDSKSFNASLGTYHDLKKILDKSFLDDKTNEQIIEDIVLTLTLFEDRDMIHERLQKYSDIFTSQQLKKLERRHYTGWGRLSYKLINGIRNKENNKTILDFLIDDGDANRNFMQLINDDSLSFKTTIQEAQVVGDVDDIEAVVHDLPGSPAIKKGILQSVKIVDELVKVMGHNPQNIVIEMARENQITGYGRNRSNQRLKRLQDSLKEFGSDILSKKKPSYVDSKVENSHLQNDRLFLYYIQNGKDMYTGEELDIDHLSDYDIDHIIPQAFIKDNSIDNRVLTSSAKNRGKSDDVPSIEIVRNRKSYWYKLYKSGLISKRKFDNLTKAERGGLTETDKAGFIKRQLVETRQITKHVAQILDARFNTKCDENDKVIRDVKVITLKSSLVSQFRKEFKFYKVREINDYHHAHDAYLNAVVGTALLKKYPKLAPEFVYGEYKKYDVRKLVAKSSDNHSELGKATAKYFFYSNLMNFFKTEVKYADGRVFERPDIETNADGEVVWNKQRDFNIVRKVLSYPQVNIVKKVEVQTGGFSKESILPKGDSDKLIPRKTKKLQWETQKYGGFDSPTVAYSVLVVADVEKGKTRKLKTVKELVGISIMERSSFEENPVSFLEKKGYHNVQEDKLIKLPKYSLFEFEGGRRRLLASATELQKGNEVVLPQYMVNLLYHSQHVNNSHKPEHLNYVKQHKDEFKDIFNLIISIARINILKPKVVDNLINEFTEYGQEDISSLSESFINLLKFISFGAPGAFKFLKLDVKQSNLRYKSTTEALSATLIHQSVTGLYETRIDLSKLGEE

SEQ ID NO: 194 - protein, 1128 aa, Streptococcus vestibularis
MSDLVLGLDIGIGSVGVGILNKVTGEIIHKNSRIFPAAQAENNVERRTNRQGRRLTRRKKHRRVRLNHLFEESGLITDFTKVSINLNPYQLRVKGLIDELSNEELFIALKNMVKHRGISYLDDASDDGNSSVGDYAQIVKENSKQLETKTPGQIQLERYQKYGQLRGDFTVEEDGKKHRLINVFPTSAYRSEALRILQTQKEFNPQITDEFINRYLEILTGKRKYYHGPGNEKSRTDYGRYTTKKDSENEYITLDNIFGILIGKCTFYPEEYRAAKASYTAQEFNLLNDLNNLTVPTETKKLSEEQKNQIINYVKNEKAMGPAKLFKYIAKLLSCDVADIKGYRIDKSDKAEIHTFEAYRKMKTLETIDFEKMSRDQLDKLAYVLTLNTEREGIQEALDHEFADGNFSQEQIDELVQFRKANSSIFGKGWHNFSVKLMMELIPELYATSEEQMTILTRLGKQKTTSSSNKTKYIDEKLLTEEIYNPVVAKSVRQAIKIVNAAIKEYGDFDNIVIEMARETNEDDEKKAIQKIQKANKDEKDAAMLKAANQYNGRAELPHSVFHGHKQLATKIRLWHQQGERCLYTGKTISIHDLINNPNQFEIDHILPLSITFDDSLANKVLVYATANQEKGQRTPYQALDSMDDAWSFRELKAFVRESKSLSNKKKEYLLTEEDISRFDVRKKFIERNLVDTRYASRVVLNALQEHFRAHKTDTKVSVVRGQFTSQLRRHWGIEKTRDTYHHHAVDALIIAASSQLNLWKKQKNTLVNYSENQLLDIETGELISDDEYKESVFKAPYQHFVDTLKSKEFEDSILFSYQVDSKFNRKISDATIYATRQAKVGKDKKDETYVLGKIKDIYSQTGYDAFIKIYQKDKSKFLMYRHDPQTFEKVIEPILENYPNKEMNEKGKEVPCNPFLKYKEEHGDYIRKYSKKGNGPEIKSLKYYDSKLGNHIDITPKDSNNKVVLQSVSPWRADVYFNKTTGKYEILGLKYADLQFEKGTGTYKISQEKYNVIKKKEGVDSDSEFKFTLYKNDLLLIKDTETKEQQLFRFLSRTKPNVKHYVELKPYDKQKFEGNESLINVLGAVAKGGQCQKGINKPNISIYKVRTDVLGNQHIIKNEGDKPKLDF

SEQ ID NO: 195 - protein, 1080 aa, Methylocystis sp.
MRVLGLDGGIASIGWALIEIFEDHEPSDGRIIDTGAWMFDAPEEKSQTGTKLKSELRRIFRGQRRVIRRRRQRMNEVRRILHRHGLLSSDNRDALKQPGLDPWKIRAEGIDRLLSPIEFAVALGHIARHRGFKSNSKGAKTSDLDAESSRMKKAVGETREKLARFGSPAKLLVEDEGFVLRQTKLKSGALETVRRFRNRDGDYSRSLLRDDLAAEVRALFRAQARLQSTFAKVELEAEFTQAAFFQRPLQDSERLVGPCPFEPAEKRSPKRGYSFELFRFLSRLNHLTLREGSEERTLTVEELRTAAADFGGVAKFTFSTLRKRLALPDIAIFVGIKADDEKKLDVVARSGEAATGTARLRRVVIDALGELAWGALISAPERLDKITEIITFRSDLDRIRAGLIEAGFDTPLIEAIVRAAADGKLDAFTGVGHISAKAARNIIPGLMRGMTYDKACAAAGYDHTASRERDAFDVGMHGKEALKKILQEERISRELVGSPSARKALIEAVKQVKAIIEKYGVPDRIHVELARDVGKSIEERRDIHFGIEKRSRQKDKLRELFGKEVGHLPQDGERGKEELLRFELWNEQMGRCLYTDEYINPKQLVASDNSVQVDHILPWSRFGDDSYLNKTLCTAKANQDKKGRTPYEWFRADKPEAEWDAFVARVESIQFMKGLKKRNYKLKNAEEAAEKFRSRNLNDTRWTCRLLAEALKQLYPKGEKDKDGKERRRVFTRPGALTNRLRRAWSLQRRKKSEKGERIADDRHHALDAIIVAATTESLLIRATREVQDIERKGLHYDLTKNITQPWPGFADEALDAVEKVFVARAERRRARGKAHDATIRHIAVRDDEAKVYERKKVGDIKLGDLIRVKDAERNAPLIENLRKWIEAGSPRDNPPLSPKGDPVSKVRLVTKNKVNITLDTGNPERLATVDRGEMARVDVFRKANRKGKYEYYLVPIYPHEIATMETPPMRAVQGGGDDDKWPEIDSTFEFLWSINQLSLLELTKPDGEVIRSYFRSLDRNTGALTVSGIANSTATRKGIGTRTLIDFKKLHVDRLGQIFEVERELRTWRGETWRGKDCI

SEQ ID NO: 196 - protein, 1087 aa, Phascolarctobacterium succinatutens
MLRMKYAIGLDIGIASVGYAVLALDHEENPWGIIRLGSRIFDVAENPKDGASLALPRREARSVRRRLRRHHHRLERIKNLLINTEFITKDELLHLYDGNLSDVYELRVKALDYSVTNAELTRILLHLAQRRGFKSNRKSDANDKEAGQLLEAVSANAKRMQENHYRTVGEMFYKDDLFSKYKRNKGGTYLTTVHRDMIAAEARTILEKQFALGNNICTQDFIDKYLSILLSQRQFDEGPGEPSPYAGNQIANMIGKCTFEPNEYRAAKASYSFERFNLLQKVNHLRLLLEGKSIALDNEQRKKIIALAHDKADLRYSHIRKALGLDEKVLFNTITYNDDVSVIEKKTKFNFLQAYHQIKKVLAEDMQKLTTEQLDNIGQILSTYKSDNKRTEELSALGLEKKIIDALLGINGLSKFAHLSLKALRKINPYLEEGKIYNEACTAAGYDFKAHANTQKTELLPAYKEEMDDITSPVARRAIAQSIKVINAIIREQKGSPLYINIELAREMAKGFDERTQIDKANKENQAKNERIMERIRTEFHKANPTGMDLIKLKLWEEQDGRSPYSQKAISINRLFEPGYVDIDHIVPYSISFDDSFKNKVLVFSDENRDKGNRLPIAYLQSKFGAKAAENFMIWVQSNIKDYKKRQKLLKREITEEDINKFKERNLQDTKTISRFLYNYINDYLLFAPSDTGKKKRVTAVNGTITAYLRKRWGINKIRANGDKHHAVDAVVIACTTDKMIKDLSSFSRYHELEYTHTDTESFLVNSLTGEILKRFPYPWEDFRPELMARLSDNPADALRKLNLIFYHGIDLSTIKPIFVSRMPRHKVTGAAHKATIKSARCLDNGIVICKTSLQNLKLDKEGEIANYYAPESDTILYNALKERLRSYDNKPAKAFAEPFYKPKADGTPGPLVKKVKVYEKSTLNVAVQQNTAVADNDSMVRVDVFHVKGNGYYLVPIYIADTLKKELPNKAIVAYKPYADWPVMDDSNFIFSLYPNDLIKFEHKNSVKFAKVNKESTLNDFYSTKSEIVYFKGCNINTGAITIINHENTYVVSSLGVKTLPSLEKYQADVLGNYTKVKKEVRKPFR

SEQ ID NO: 197 - protein, 1375 aa, Lactobacillus ruminis
MRKNQEPYNIGLDIGTSSIGWSIMNDNFDLMRVKGKKGIGVRLYNEGQSAAERRMHRTARRRYGRRKWRLRLLEDFFDEHMAEVDDTFFARLKDSNISPKDDKKYRKSLLFPKSKGVTYQDDGEFYKKYPTMYHLRYALMTEHRKFDLREIYLAFHHMVKYRGNFLYDTSVDSFEAKNLDIKGKFDEINDLLSSYTDFYVDNSNAALVESILLEKNTTRKDKSKKIAKLLHVEDKEKGKNKKAKDLATQISNAVLGLKCNFHLIFELQQKYSFDLCSEKTEENIAKLSEVLDENQKMLLMILKEVQDQVMLNAFVPSGMSLSEAMMQKYDDYGEQLKIYHELEHSVSDDSAAKLRGAYRDYNDNIIKRIDGDNKKDTFYKRVKNILTKISKEYVDQDVLESCGKLKKLIDENKLFIRQRTAANGVLPHQLHQIEMRKIIDNQKEYYPWLAEPNPNEKRRVYSKYKVEELIAFRIPYYVGPLVDPNNADKNKEARFSWMVRKKDGEITPWNFYDKVDWAESANNFIERMKSKDTYLLGEDVVPKESMLYQKYEVLNELNNLRINDSGLSDSFEDVKLKQAIYNDLFKKQKIVKITDLQNYLVQNHKYLVKPKISGLADENRFLSSLSTYSDLKTIFGDKVDDRTYFNDFEKMVEYSTVFEDGHDYNQKLDEYTWLTKEEKYKIGKKRYRGWGKLSKKLLTGLRDKNNHTIMDNLWETNRNFMQIQTADEFSKQIAEENERHLKGSVSDAINDMYTSPANKKAIRQVLRVVDDIQKAMGYAPSSISLEFAREDGPSVRTVSRANRMKSIYEKYASEVSEEVMKDLDGVIKDKKGLNDRLYLYFEQQGKDMYSGHPLDFDKVISGQEYDIDHILPQAVIKDDSLDNRVLTTKALNNDVKSKGVPCRMFNGMHSFWKNLYDKGFISRRKFNNLTTNPENIDKYKMKGFVNRQLVETRQIIKLVANVLNDKYQNDDVDIIEVRAELTHDVRKHFKFYKNRNVNDYHHAFDAYLTSFIGHYLFKKYPNLRPLFDYNDFMKVSDNVFKQLRGNNFLGEFLNKTGDIISTDGNFVLNKEEMINKLNKAYAFKKILVTKEVGQRTGAMFNETRYPAPNSRKAALKYRRMPKPDSLISVKDYKNTDIYGGYSGKNDAYMVIVDMGKQYMVVGVPVRYTEKLDKLRIKHSELYRDELRKVLSRDKTLLDSKGNVKRFDIVLDRVLYGQLIEDGNELFTLGSSKYKRNFRQLFLDKQCIEILDSSATPQPTDEELIWVYDQILDKVDKYFELYDINRQRETLRKGRAAFCSLPNISMKKDDVTKKKILNEILVALHANESESNCEKIGKKVFGRLQVPGGIKLSKEAKLIYQSPTGLFERVVYLKDL

SEQ ID NO: 198 - protein, 1391 aa, Prevotella oralis
MKKILGLDLGTTSIGWALVNEKENNEELSSIIRLGVRVNPLTVDEKSNFEKGKDITTNADRTKCRSARRNLQRFKLRREALADCLKRHGLMTDETPLCETNNSIIFKTYSNRAKAVCEKIALDDFVRVLFMINKKRGYKSSRKLNTDDEGTLVDGMDVAKLLYNEQITPGEYLLRLFKKGKKTRPDFYLSDLKAELERIWDFQRTFYPEILCNALKEDLKGKSRTQSSAIFYAKYKVSTAKIAGKDKRLQELTWRTDALRKQLTIDEVAYVICSINGEVNGSSQRLSMISDRSKLLYFNHQTIGQYLMQRLEENPNAGLKNIIFYRQDYEDEFNDIWNSQATYHKELTPELKKEVKDIIFYQRGLKSCKWLINYCELEHEEIEVKTPEGKLRKITIGSKTCPKSSPLFQEFKIWQVLNNLQVSPLNSRRKAKRKKDEEPSLFSDEDMNTACRYLNEEEKLTLFKELSIKKELKKKDALKLLFENYKELDLNYKVISGNVTMANLYRAFQDIISLTGNGEFDFQAMPAEEAEKTVEEIFGGLGYKTAFLHFDASLHDKEFERQPAYRLWHLLYSYAGDQSKTGIEALVKRIQELCGFEPEYARILANISFIPDYGNLSSKAMRKILPYMQDGYEYSEACSKAGYRHSASSLTKEEINKKNYKTHLDEIKRNSLRNPIVEKILNQMVNVVNSVIDTYSNIDEIRIEMARELKKSKPEREDMSFAISKATKETERIKGILEQEFKIQHVTRNDIIRYRLYEELKPNGYKTLYSNTYIPREDLFSKKFDIEHIIPKARLFDDSYSNKTLELRDINIEKGNQTAYDFVLSKYGEEGLYKYEQRVEEFKKNNEQAGTKCRKLLMREADIPSDFLNRDLNDSQYIAKKAHELLREIVPTVTATTGSITNRLREDWKLVNVMKELNWEKYDKLGLTEEYKDKDGNTVRHIKDWTKRNDHRHHAMDALTIAFTKPSFIQYLNNLNARSNRGGSIYGIEQKELERENNKLVFIPPIDPKIFRKQAKEHLSNILISIKAKNKVVTKNVNKTKSKSGTNRKVQLTPRGQLHLETVYGKIRTYKTEEIKVGTKLTEELIAKVADKKIREALMQRLSEYGGNIKKAFQNISKHPIWLNGSHTKHVPEKVKIVFFEDVFTIRKAITPDIKIDKVIDSKIRRILQERLNEFGGEASKAFSNLDENPIWFNRDKGIAIKSVKIRGIAKGTAIRVKKDIHGKTIIGNNGYPVANDYVNTGNNHHVAIFRDKDGNLQEHIVSFYEATARAIQNLPIVDRNYNSEKDWKFLFSMKQNEYFVFPNPNTGFNPSEISLKDEKNYALISPNLFRVQKLSHYYYVFRHHLETNVDTNLQLKDITWKRITAVNNLTGAVKVRIDHLGRIVDVGEYK

SEQ ID NO: 199 - protein, 1167 aa, Streptococcus sanguinis
MLFGLKTKFKDCFELEEEPDLNFSKENYDDNLEKLLGELGEDFSDVFDKLKILRDTILLSGMLTYTGATHARFSATMVERYEEHRKDLQRFKSFIKQNLSEQDYLDIFGRKTQNGFDVDKETKGYVGYITNKMVLTNPQKQKTIQQNFYDYISGKITGIEGSEYFLNKISDRTFLRKLRTSDNGAIPNQIHAYELEKIIERQGKDYPFLLENKDKLLSILTFKIPYYVGPLAKGNNSRFAWIKRANSSDILDDNDEDTRNGKIRPWNYHKLINMDETRDAFITNLIGNDTILLNEKVLPKRSLIYEEVMLQNELTRVKYKDKYGKAHFFDSEHRQNIINGLFKINSKRVNAERLIKYLSDNHKDLNAIEIVSGVEKGKSFNSTLKTYNDFKTIFSEEFLDSEIYQKELEEIIKVITVFDDKKSIKNYLTKYFGHLEFLDEEKINQLSKLRYTGWGRYSAKLLLDIRDEDTGFNLLQFLRNDEENRNLTNLISDNTLSFDPKIKAIQSKSTVEDDVFDEIKKLAGSPAIKRGILNSIKIVDELVQIIGYPPQNIVIEMARENMTTEEGQKKTKTRKSKLESALKNIENSVLENGKVLHSDEQLQSEKLYLYYLQNGKDIYSLDETGSPAPIYLDQLDQYEVDHIIPYSFLPIDSIDNKVLTHRKNNQRKLDNIPDKETVAHMKPFWEALYNAKLISQTKYQRLTTSERTPDGVLTESMKAGFIERQLVETRQIIKHVARILDNRFSDTKIITLKSQLVTNFRNTFHIAKIRELNDYHHAHDAYLAVVVGQTLLKAYPKLAPELIYGHHVHFNRHEENKATLRKHLYSNIMRFFNNPDSKVSKDIWDCNRDLPIIKHVIYNSQINFVKRTMIKKGAFYNQNPVGKFNKQLAANNRYPLKTKALCLDTSIYGGYGPMNSTLSIIIIAERFNEKKGKIETVKEFHDIFIIDYEKFNNNPFQFLNDTSENGFLKKNNINRVLGFYRIPKYSLMQKIDGTRMLFESKLNLHKATQFKLTKTQNELFFHMKRLLTNSNLMDLKSESAIKESQNFILKHKEEFDNISNQLSAFSQKMLGNTTSLKNLIKGYNERKIKEIDIREETIKYFYDNFIKMFSFVKSGAPKDINDFFDNKYTVARMRPKPDKRLLNATLIHQSITGLYETRIDLSKLGED

SEQ ID NO: 200 - protein, 1334 aa, Staphylococcus pseudintermedius
MGRKPYILSLDIGTGSVGYACMDKGFNVLKYHDKDALGVYLFDGALTAQERRQFRTSRRRKNRRIKRLGLLQELLAPLVQNPNFYQFQRQFAWKNDNMDFKNKSLSEVLSFLGYESKKYPTIYHLQEALLLKDEKFDPELIYMALYHLVKYRGHFLFDHLKIENLTNNDNMHDFVELIETYENLNNIKLNLDYEKTKVIYEILKDNEMTKNDRAKRVKNMEKKLEQFSIMLLGLKFNEGKLFNHADNAEELKGANQSHTFADNYEENLTPFLTVEQSEFIERANKIYLSLTLQDILKGKKSMAMSKVAAYDKFRNELKQVKDIVYKADSTRTQFKKIFVSSKKSLKQYDATPNDQTFSSLCLFDQYLIRPKKQYSLLIKELKKIIPQDSELYFEAENDTLLKVLNTTDNASIPMQINLYEAETILRNQQKYHAEITDEMIEKVLSLIQFRIPYYVGPLVNDHTASKFGWMERKSNESIKPWNFDEVVDRSKSATQFIRRMTNKCSYLINEDVLPKNSLLYQEMEVLNELNATQIRLQTDPKNRKYRMMPQIKLFAVEHIFKKYKTVSHSKFLEIMLNSNHRENFMNHGEKLSIFGTQDDKKFASKLSSYQDMTKIFGDIEGKRAQIEEIIQWITIFEDKKILVQKLKECYPELTSKQINQLKKLNYSGWGRLSEKLLTHAYQGHSIIELLRHSDENFMEILTNDVYGFQNFIKEENQVQSNKIQHQDIANLTTSPALKKGIWSTIKLVRELTSIFGEPEKIIMEFATEDQQKGKKQKSRKQLWDDNIKKNKLKSVDEYKYIIDVANKLNNEQLQQEKLWLYLSQNGKCMYSGQSIDLDALLSPNATKHYEVDHIFPRSFIKDDSIDNKVLVIKKMNQTKGDQVPLQFIQQPYERIAYWKSLNKAGLISDSKLHKLMKPEFTAMDKEGFIQRQLVETRQISVHVRDFLKEEYPNTKVIPMKAKMVSEFRKKFDIPKIRQMNDAHHAIDAYLNGVVYHGAQLAYPNVDLFDFNFKWEKVREKWKALGEFNTKQKSRELFFFKKLEKMEVSQGERLISKIKLDMNHFKINYSRKLANIPQQFYNQTAVSPKTAELKYESNKSNEVVYKGLTPYQTYVVAIKSVNKKGKEKMEYQMIDHYVFDFYKFQNGNEKELALYLAQRENKDEVLDAQIVYSLNKGDLLYINNHPCYFVSRKEVINAKQFELTVEQQLSLYNVMNNKETNVEKLLIEYDFIAEKVINEYHHYLNSKLKEKRVRTFFSESNQTHEDFIKALDELFKVVTASATRSDKIGSRKNSMTHRAFLGKGKDVKIAYTSISGLKTTKPKSLFKLAESRNEL

SEQ ID NO: 201 - protein, 1156 aa, Ruminococcus albus
MGNYYLGLDVGIGSIGWAVINIEKKRIEDFNVRIFKSGEIQEKNRNSRASQQCRRSRGLRRLYRRKSHRKLRLKNYLSIIGLTTSEKIDYYYETADNNVIQLRNKGLSEKLTPEEIAACLIHICNNRGYKDFYEVNVEDIEDPDERNEYKEEHDSIVLISNLMNEGGYCTPAEMICNCREFDEPNSVYRKFHNSAASKNHYLITRHMLVKEVDLILENQSKYYGILDDKTIAKIKDIIFAQRDFEIGPGKNERFRRFTGYLDSIGKCQFFKDQERGSRFTVIADIYAFVNVLSQYTYTNNRGESVFDTSFANDLINSALKNGSMDKRELKAIAKSYHIDISDKNSDTSLTKCFKYIKVVKPLFEKYGYDWDKLIENYTDTDNNVLNRIGIVLSQAQTPKRRREKLKALNIGLDDGLINELTKLKLSGTANVSYKYMQGSIEAFCEGDLYGKYQAKFNKEIPDIDENAKPQKLPPFKNEDDCEFFKNPVVFRSINETRKLINAIIDKYGYPAAVNIETADELNKTFEDRAIDTKRNNDNQKENDRIVKEIIECIKCDEVHARHLIEKYKLWEAQEGKCLYSGETITKEDMLRDKDKLFEVDHIVPYSLILDNTINNKALVYAEENQKKGQRTPLMYMNEAQAADYRVRVNTMFKSKKCSKKKYQYLMLPDLNDQELLGGWRSRNLNDTRYICKYLVNYLRKNLRFDRSYESSDEDDLKIRDHYRVFPVKSRFTSMFRRWWLNEKTWGRYDKAELKKLTYLDHAADAIIIANCRPEYVVLAGEKLKLNKMYHQAGKRITPEYEQSKKACIDNLYKLFRMDRRTAEKLLSGHGRLTPIIPNLSEEVDKRLWDKNIYEQFWKDDKDKKSCEELYRENVASLYKGDPKFASSLSMPVISLKPDHKYRGTITGEEAIRVKEIDGKLIKLKRKSISEITAESINSIYTDDKILIDSLKTIFEQADYKDVGDYLKKTNQHFFTTSSGKRVNKVTVIEKVPSRWLRKEIDDNNFSLLNDSSYYCIELYKDSKGDNNLQGIAMSDIVHDRKTKKLYLKPDFNYPDDYYTHVMYIFPGDYLRIKSTSKKSGEQLKFEGYFISVKNVNENSFRFISDNKPCAKDKRVSITKKDIVIKLAVDLMGKVQGENNGKGISCGEPLSLLKEKN

SEQ ID NO: 202 - protein, 1440 aa, Weeksella virosa
MKTILGLDLGTNSIGWALVEQDFENKQGLILGMGSRIIPMDAGIIGKFAEGSSISQTAERTGYRSIRRLRERHLLRRERLHRVLNILKFLPEHYAAEIDFEKRFGQFLAETEPKLAWKKNAEGKFEFLFQRSFDEMVADFKANGQDIKIPYDWTIYYLRKKALTQKISPQELAWIILNFNQKRGYYQLRGEEEEENPNKKVEFYSLKIVDVVADEQPNKKGDTWYSLHLENGWVYRRSSKIPLYDWKDKVRDFIVTTDINEDGSEKLDKDGEVKRSFRAPKEDDWTLIKKKTEQEIEQFNQTVGSYIYEALLDNPTQKIRGKLVRTIERKFYKSELKKILEKQIELQPELFTEDLYNACARELYRRNVAHQQQLSSRDFVYLFLNDIIFYQRPLRSQKSLISNCSLEFRTIKDKDGNGQIIYLKAIPKSNPYYQEFRVWQWLYNLKIFTKEDDKDVTNQFINKVEDLEALFEFLMNQKEVNHTDILTYLIEPIVKSKYPNAKGKAFKDELKKELKKYRWNYVYDADKDESKSYPMNETRYELRKRLDKVENVPADFMTRKIEQHLWHIIYSVTDKIEFEKALKSFANKYDLHQESFVENFKRFKPFDSDYGTYSEKAIKKLLPLMRVGKYWSWDIIDDKTKTRIGKIITGEYDETIKNRVREKAIDLTEENHFQGLQLWLAQYIVYDRHSEADIAGKWNSVADLEQYLSEFKQHSLRNPIVEQVITETLRVVRDIWKQYGKGAKDYFDEIHIELGREMKNTAEERKRLSSIISENETTNLRIRAILEELMYDENMENVRPYSPMQQEALKIYEDGVLSSSVEIPEDIEKISKKSEPTKSEIQRYKLWLEQKYRSPYTGRPIPLSKLFTPAYQIEHIIPQARFFDDGFSNKVICESEVNALKDKMLGLEFIQNYYGQKVTTSFGEVTILTEDAYKAFVKEHYDKNRSKRNKLLLEEIPEKMIDRQMNDTRYISKYISKVLSNLVRGEKDDEGVNSKNIIPGNGKITGILKQDWGLNDVWNDLILPRFERMNQLTNSTDFTAWNEKHQKFLPSVPLELSKGFQKKRIDHRHHALDALIIACATRDHVNLLNNKHAKSRNERYDLQHKLRHTTPWQDKEGKVRTKFTEFKKPWETFTQDTKKELEKIVVNFKQNLRVINKATNYYEKIVDGKKVMFKQEGVNWAIRKPMHKETVSGKIDLPRVKVSKGKILTATRKSLDTSFNAKTILSITDTGIQKILLNYLKAKGNPELAFSPEGIEEMNQNISLYNDGKPHQPILKVRVFEQGSKFPLGETGNKTTKYVEAAKGTNLFFGVYEDNQGKRSYDTIPLNIVIERQKQGLNSVPETNEKGHRLLFSLSPNDLVYVPIEGEVFDETNPDVNRIYKVVSFSGSQMFCVRQDVATSIVYKLEFSSLNKMERTIDGIMIKEICIKLKVDRLGNISKA

SEQ ID NO: 203 - protein, 1179 aa, Sphaerochaeta globus
MSKKVSRRYEEQAQEICQRLGSRPYSIGLDLGVGSIGVAVAAYDPIKKQPSDLVFVSSRIFIPSTGAAERRQKRGQRNSLRHRANRLKFLWKLLAERNLMLSYSEQDVPDPARLRFEDAVVRANPYELRLKGLNEQLTLSELGYALYHIANHRGSSSVRTFLDEEKSSDDKKLEEQQAMTEQLAKEKGISTFIEVLTAFNTNGLIGYRNSESVKSKGVPVPTRDIISNEIDVLLQTQKQFYQEILSDEYCDRIVSAILFENEKIVPEAGCCPYFPDEKKLPRCHFLNEERRLWEAINNARIKMPMQEGAAKRYQSASFSDEQRHILFHIARSGTDITPKLVQKEFPALKTSIIVLQGKEKAIQKIAGFRFRRLEEKSFWKRLSEEQKDDFFSAWTNTPDDKRLSKYLMKHLLLTENEVVDALKTVSLIGDYGPIGKTATQLLMKHLEDGLTYTEALERGMETGEFQELSVWEQQSLLPYYGQILTGSTQALMGKYWHSAFKEKRDSEGFFKPNTNSDEEKYGRIANPVVHQTLNELRKLMNELITILGAKPQEITVELARELKVGAEKREDIIKQQTKQEKEAVLAYSKYCEPNNLDKRYIERFRLLEDQAFVCPYCLEHISVADIAAGRADVDHIFPRDDTADNSYGNKVVAHRQCNDIKGKRTPYAAFSNTSAWGPIMHYLDETPGMWRKRRKFETNEEEYAKYLQSKGFVSRFESDNSYIAKAAKEYLRCLFNPNNVTAVGSLKGMETSILRKAWNLQGIDDLLGSRHWSKDADTSPTMRKNRDDNRHHGLDAIVALYCSRSLVQMINTMSEQGKRAVEIEAMIPIPGYASEPNLSFEAQRELFRKKILEFMDLHAFVSMKTDNDANGALLKDTVYSILGADTQGEDLVFVVKKKIKDIGVKIGDYEEVASAIRGRITDKQPKWYPMEMKDKIEQLQSKNEAALQKYKESLVQAAAVLEESNRKLIESGKKPIQLSEKTISKKALELVGGYYYLISNNKRTKTFVVKEPSNEVKGFAFDTGSNLCLDFYHDAQGKLCGEIIRKIQAMNPSYKPAYMKQGYSLYVRLYQGDVCELRASDLTEAESNLAKTTHVRLPNAKPGRTFVIIITFTEMGSGYQIYFSNLAKSKKGQDTSFTLTTIKNYDVRKVQLSSAGLVRYVSPLLVDKIEKDEVALCGE

SEQ ID NO: 204 - protein, 1370 aa, Streptococcus gallolyticus
MTKKNYSIGLDIGTNSVGWAVITDDYKVPAKKMKVLGNTDKKYIKKNLLGALLFDSGETAEATRLKRTARRRYTRRKNRLRYLQEIFAEEMTKVDESFFYRLDESFLTTDEKDFERHPIFGNKAEEDAYHQKFPTIYHLRNYLADSSEKADLRLVYLALAHMIKYRGHFLIEGKLNAENTDVQKLFTDFVGVYDRTFDDSHLSEITVDVASTLTEKISKSRRLENLIKYYPTEKKNTLFGNLIALALGLQPNFKMNFKLSEDAKLQFSKDTYEEDLEELLGKIGDDYADLFTSAKNLYDAILLSGILTVDDNSTKAPLSASMIKRYVEHHEDLEKLKEFIKANKSELYHDIFKDKNKNGYAGYIENGVKQDEFYKYLKNTLSKIDGSDYFLDKIEREDFLRKQRTFDNGSIPHQIHLQEMHAILRRQGDYYPFLKEKQDRIEKILTFRIPYYVGPLVRKDSRFAWAEYRSDEKITPWNFDKVIDKEKSAEKFITRMTLNDLYLPEEKVLPKHSHVYETYAVYNELTKIKYVNEQGKESFFDSNMKQEIFDHVFKENRKVTKEKLLNYLNKEFPEYRIKDLIGLDKENKSFNASLGTYHDLKKILDKAFLDDKVNEEVIEDIIKTLTLFEDKDMIHERLQKYSDIFTANQLKKLERRHYTGWGRLSYKLINGIRNKENNKTILDYLIDDGSANRNFMQLINDDTLPFKQIIQKSQVVGDVDDIEAVVHDLPGSPAIKKGILQSVKIVDELVKVMGDNPDNIVIEMARENQTTNRGRSQSQQRLKKLQSSLKELGSNILNEEKPSYIEDKVENSHLQNDQLFLYYIQNGKDMYTGDELDIDHLSDYDIDHIIPQAFIKDDSIDNRVLTSSAKNRGKSDDVPSLDIVRARKAEWVRLYKSGLISKRKFDNLTKAERGGLTEADKAGFIKRQLVETRQITKHVAQILDARFNTEHDENDKVIRDVKVITLKSNLVSQFRKDFEFYKVREINDYHHAHDAYLNAVVGTALLKKYPKLASEFVYGEYKKYDIRKFITNSSDKATAKYFFYSNLMNFFKTKVKYADGTVFERPIIETNADGEIAWNKQIDFEKVRKVLSYPQVNIVKKVETQTGGFSKESILPKGDSDKLIPRKTKKVYWDTKKYGGFDSPTVAYSVFVVADVEKGKAKKLKTVKELVGISIMERSFFEENPVEFLENKGYHNIREDKLIKLPKYSLFEFEGGRRRLLASASELQKGNEMVLPGYLVELLYHAHRADNFNSTEYLNYVSEHKKEFEKVLSCVEDFANLYVDVEKNLSKIRAVADSMDNFSIEEISNSFINLLTLTALGAPADFNFLGEKIPRKRYTSTKECLTATLIHQSITGLYETRIDLSKLGEE

SEQ ID NO: 205 - protein, 1044 aa, Nitrosomonas sp.
MLHKMRYRLALDLGSTSLGWAMVRLNANQQPCAVIKAGVRIFSNGRNPKDGSSLAVTRREARSMRRRRDRLLKRKARMMRTLIEYGFFPANETQRKALENLNPYALRAKGLDEALTPSEFARALFHINQRRGFKSNRKTDKKDSDSGALKTAIKQLHSVLDPQGNDGKPRTVGELLYKRFTDLSKLPKDRTVRARYRQDKIVKDDGKTKIDKYYDLYIDRAMIEQEFDALWKKQSELNPILFTENARADLKDVLLYQRSLKPVKPGRCTFMSEEERAPLALPSTQRFRMYQEVNNLRILREGLKEESLTLQQRDDLINALEKNNRRTFTQIKKLLGVGGSVQFNFEDPKREELKGNTTSAILGKSEHFGEAWFAFNEAKQDAIVLQLIKEENEAKLVRWLQDETGIDEKRAEVIANAGLPEGYGSLCIEALARILPELRRDVVTYDKAVQAAGFEHHSKLNRNEEIPDITFKIESIDRNSGEIKQFHLHKELPYYGEYLQRHVGFGSGKPEDSIEKRYGKIANPTVHIGLNQVRVVVNALIKRYGHPSEIIVEVARDLKQSKDRRDEENKRQAENQKRNERLRKDIADILGISEERVRRDDIEKMILWEELSFDPADRRCPYSGVQVSTVMLLSDEVEVEHILPFSQTLDDSLNNKTVALRQANRIKGNRTPWEAFGTSNISGFDYSGILTRAELMPKAKRYRFAEDGYQRWLKDDAGFLARALNDTRHLSKIAREYMSLICPNTRVIPGQMTAMLRRNFGLNDVLGLNGEKNRNDHRHHAVDACVIAVTDQGLLQRFAAASASARERQLNRLVENMPLPWESYREHVRRAIDGIWVSHRPDHSHEGAMHNDTAYGLRGNGRVSFHKMVEGKREYIEDNLKVIEITDTKAIDRHGLLPTGKPRPYKGYKGDSNYCIEIVRNEKGRWEGEIISTFDAYQLVRKYGIVQLRYPVLSVSGKPLVMRLIRNDFVRLEHEGITRTLRVCKMREDGQVALADVTEANVDARTRTKEICYVFKTGGSLQKAKARRITISPIGELRDPGFKE

SEQ ID NO: 206 - protein, 1045 aa, Acidovorax avenae
MQKEKPLAYRLALDLGSTSLGWAVLRLSAPGEPSAVIRAGSRIFSDGRNPKDGSSLAVTRRAARAMRRRRDRLLKRKARMLAALERHGFFPQDEAARKALEKLNPYGLRARGLESALKPEEFGRALFHLNQRRGFQSNRKTDRKDSDSGALKQAIGTLRAQMHESGCRTVGEWFWKVRMERKPEGVKGQGVRARYRETPFTTDEGKKRIDKRYDLYVDRAMVAQEFDALWAAQATFAPALFNEAARAELRDILLHQRKLRPVQPGRCTLVPEEPRALLALPSTQRFRIYQEVNHLRVLHDELREEALTLAQRDQIVALLERQAKVTFTAMRKALGFSALFNLEDAKRDGLKGNATTAALGKKDLFGPLWAGFDTALQDEIVTQLMTEESEPRLIAWLQEHTGVDEARAQAIANAGLPEGYGSLGRTALARIVPELQRDVITYDKAVQAAGFAHHSDLGFSFEHDADEVERIGERTIASTGEIKPVFAFKQLPYYGRALQRHVAFAKENPRNDEERYGKIANPTVHIGLNQVRVVVNALMCRYGRPTEVVIELARDLKQSREQKLEAQQRQADNQKRNARIRRSIAEVLGISEERVRTLDIQKWILWEELSHDAADRRCPYSGVQISASMLLGERVEIEHILPFSMTLDDSLNNRTVALREANRIKRNRTPWDARTDFEAHGWSYDGILQRAERMPQRKRHRFAPDGYERWLGEDKDFLARALNDTRYLSRVAAEYLRLVCPGSATRVIPGQMTALLRGKFGLNDVLGLDGEKNRNDHRHHAVDACVIGVTDQRMMQRFAQANAQAREDGLTRLVEDMPLPWPTYRAHVERAVRHIWVSHKPDHGFEGAMMEETSYGILRDGTIKQRRKADGSAGREISRLIRITEPSQPQRHGVDAEGRPLPYKGYVGGSNYCLEITVNDKGKWEGQVISTFDAYRIVREGGLRQLRHSTQGQNGQALAMRLVIGDSVRLEVDEQERVMRIVKINGNNGQVFMAPVHEANVDARNSDKNEAFAYTSKIAGSFQKTKARQVTISPIGELRDPGFKG

SEQ ID NO: 207 - protein, 1218 aa, Prevotella denticola
MKASEEKLSKGLSTYMKENNLLTVGAAFAQLEDEGVRIRNNNNYRAIRSQFQHEIETIFMFQQGLSENELYERLVSEKKNIGTIFYKRPLRSQRGNVGKCTLERTKPRCAIGHPLFEKFRAWTLINNIKIRMSEEEQAEQLPMKLRFELYNDCFLAFVRAEFKFEDIRKYLEKRLGVHFSYNDKTINYKDSTSVAGCPITARFRKLLGEDWESFHVDGQKQRQAHGKNNASFHTVSYSTNDIWHFCYDAEEPEAVLSFAQDNLKWEKKKAEELVRIWSAIPQGYAMLSQKAIRNINKMLILGLKYSDAVLLAKVPEIVEITDGEILSVTEDYHRVEAQVGYEKQINNIVNALIAKYKSASEEYRFADHNYEYQLDKSDEKDIIKQIESNIGTRKWSLLDADEQTDILQKVRDKYQNFFRSHERKFVESPKLGECFEEYLMKKFPMVEGEQWKKLYHPSQIAIYRPVSAGKDRSALRLGNPDIGAIKNPTVLRVLNTLRKRVNQLLDDGLISPDETRVVVETARELNDANRKWALDNYNRIRHDENEKIKKILEEFYPKRDGISTDDIDKARYVIDQREMDYFTEEKPYNKDIKKYKLWLEQGGQCMYTGRTINLSNLFDPNSFDVEHTIPESISFDSSDMNLTLCDAHYNRFIKKNHIPADLPNYDKSVVIDGKEYSPIKPRLQRWADRVERLNRNVEYWRGQARRAQNKDRKDQCMREMHLWKMELEYWTKKLERFTITEVTDEFKNSQLVDTRVITRHAVLYLKSIFPHVDVQRGDVTAKFRKILGIQSVDEKKDRSLHSHHAIDATTLTIIPGAAKRERMLELFAKIEEVNKMLSFSGNEDRTGLKQELDGLKNQLNKEVKACRIGHNVSEIGTFINDNIIINHHVKNQALTPVRRRLRKRGHIVGGMDNPRWQTGDALRGEIHKASYYGAITQFAKDKDGKVLLKEGHPLVDPTIKFVIRRELKYKKSTADSGFASWDDLEKAIVDKELFALMKGQFPEETSFKDACEQGIYMIKKGKNGEVDTKLYRIRHIRCKTKQKNALKIKEQAYKSEKEYKRYFYAAVGDLYAMCCYTNGKTREFKIYSLYDISCHRKVGVEDIPEFITDKKGNRLMLDYKLHTGDMILLYKENPEELYDLDNVSLSKLLYKINGFENDGLRIRMVNHLVAKEAMGESVKDYAKLPDIIRCGVKTIKFLVMGENRDFVIKNGKISFNHR

SEQ ID NO: 208 - protein, 1458 aa, Fluviicola taffensis
MTKTILGLDLGTNSIGWALINQDFDNKKGEILGMGSRIIPMTQDIKDEFGKGNSISQTAERTRLRGVRRLIHRTLLRRERLHRVLNIIGFLPEHYANQIDFEKRFGKFKPESEPKISFDGNDVFLFEKSYQEMLVDFKIHQPQLVSNGKKIPHDWTIYYLRKKALSKKIEKEELAWILLNFNQKRGYYQLRGEEEEETPNKLVEFHSLKIVEVNADEPQKGKPEIWYSLVLENGWVYRRASKTPLFDWKDKIREFIVTTEINNDGTVKTDKEGTEKRSFRAPKPEDWTLQKKKTEFELSKSGNEVGAFIYESILQKPNQKIRGKLISTIERKFYKEELKTILKTQLFFHKELKDEKLYNACIEELYKNNEAHRSLLSNKGFEHLFINDILFYQRPLRSKKSQISNCPLEKRTYKKEGIEITEGIKVISKSNPIYQEFRLWQWISNLSLYCIEPTETNVTSTFLNSIEDYENLFEFLNNRKEIEQKHLLKYLLENQGFKGKLLTNELEKFRWNFVADKKYPCNETGSLLHTRLSKVKNISPDFLTKEIEHQLWHIIYSVTDKIEYEQALKTFARKNNLDVDSFFEHFKKIPPFESTYGAYSEKAIKKLLPLIRLGKYWNWEAIDSISKDRISKILSGEYDENIKNRVREKAVHLTSENNFQGLQEWLAKYIVYDRHSEGNDLGKWTSVSDLETYLKEFKQHSLRNPIVEQVITETLRVVKDIWIKHGKGTENFFDEIHVELGREMKNNSEDRKRLTNTITENENTNLRIKALLMEMMNDNDVENVRPYSPSQQEILKIYEDGALNSNIELDDEIVKISKKAEPTKSELQRYKLWLEQKYRSPYTGQVIPLNKLFTSEYEIEHVVPQSRFFDDSFSNKVICESAVNKRKDNQLGLQFIKNHSGEKVELGFGKVVQVFTEEQYLDFVKEHYSKNRSKHNKLLLEEIPEKMIERQLNDTRYISKFVSSILSNIVRSEKDDDGLNSKNILPGNGKITTELKRDWGLNDVWNDLILPRFERMNTITNSDLFTTYNDKYQKHLPTVPFEYSKGFQKKRIDHRHHAMDALVIACATRDHLNLMNNQSAKSELKRYDLQNKLRKKEPYFNQKENKQKEAFKDFIKPWGTFTEDSKNALEKIIISFKQNLRVINKATNSYESYKDEDGNLRIGKDGKPEKGLIKQKGLNWAIRKPLHKDTVSGQINLSRIKLPNGKILTATRKNLDTSFDLKTIENSITDTGIQKILKNYLLSKESPELAFSPEGLEEMNNEIEKYNNGKFHHPINKARIYELGSKFNVGQTGNRRDKFVEAAKGTNLFFAIYQDENKNRSYETIPLNEVIEHQKWRASLPKEEQEKIPLVPVNKLKGTFIFSLSPNDLVYVPSNDELERSASIDFSKLKKEQINRLYKMVSSSGSQCFFVKSEVATSVVNKMEYSSLNKMEKSIDNLMVKEICIKLKIDRLGNISKA

SEQ ID NO: 209 - protein, 1384 aa, Coriobacterium glomerans
MKLRGIEDDYSIGLDMGTSSVGWAVTDERGTLAHFKRKPTWGSRLFREAQTAAVARMPRGQRRRYVRRRWRLDLLQKLFEQQMEQADPDFFIRLRQSRLLRDDRAEEHADYRWPLFNDCKFTERDYYQRFPTIYHVRSWLMETDEQADIRLIYLALHNIVKHRGNFLREGQSLSAKSARPDEALNHLRETLRVWSSERGFECSIADNGSILAMLTHPDLSPSDRRKKIAPLFDVKSDDAAADKKLGIALAGAVIGLKTEFKNIFGDFPCEDSSIYLSNDEAVDAVRSACPDDCAELFDRLCEVYSAYVLQGLLSYAPGQTISANMVEKYRRYGEDLALLKKLVKIYAPDQYRMFFSGATYPGTGIYDAAQARGYTKYNLGPKKSEYKPSESMQYDDFRKAVEKLFAKTDARADERYRMMMDRFDKQQFLRRLKTSDNGSIYHQLHLEELKAIVENQGRFYPFLKRDADKLVSLVSFRIPYYVGPLSTRNARTDQHGENRFAWSERKPGMQDEPIFPWNWESIIDRSKSAEKFILRMTGMCTYLQQEPVLPKSSLLYEEFCVLNELNGAHWSIDGDDEHRFDAADREGIIEELFRRKRTVSYGDVAGWMERERNQIGAHVCGGQGEKGFESKLGSYIFFCKDVFKVERLEQSDYPMIERIILWNTLFEDRKILSQRLKEEYGSRLSAEQIKTICKKRFTGWGRLSEKFLTGITVQVDEDSVSIMDVLREGCPVSGKRGRAMVMMEILRDEELGFQKKVDDFNRAFFAENAQALGVNELPGSPAVRRSLNQSIRIVDEIASIAGKAPANIFIEVTRDEDPKKKGRRTKRRYNDLKDALEAFKKEDPELWRELCETAPNDMDERLSLYFMQRGKCLYSGRAIDIHQLSNAGIYEVDHIIPRTYVKDDSLENKALVYREENQRKTDMLLIDPEIRRRMSGYWRMLHEAKLIGDKKFRNLLRSRIDDKALKGFIARQLVETGQMVKLVRSLLEARYPETNIISVKASISHDLRTAAELVKCREANDFHHAHDAFLACRVGLFIQKRHPCVYENPIGLSQVVRNYVRQQADIFKRCRTIPGSSGFIVNSFMTSGFDKETGEIFKDDWDAEAEVEGIRRSLNFRQCFISRMPFEDHGVFWDATIYSPRAKKTAALPLKQGLNPSRYGSFSREQFAYFFIYKARNPRKEQTLFEFAQVPVRLSAQIRQDENALERYARELAKDQGLEFIRIERSKILKNQLIEIDGDRLCITGKEEVRNACELAFAQDEMRVIRMLVSEKPVSRECVISLFNRILLHGDQASRRLSKQLKLALLSEAFSEASDNVQRNVVLGLIAIFNGSTNMVNLSDIGGSKFAGNVRIKYKKELASPKVNVHLIDQSVTGMFERRTKIGL

SEQ ID NO: 210 - protein, 1077 aa, Neisseria bacilliformis
MQQKPQRYILGLDLGIASVGWACVWADENEHPTGLLDCGVRTFERAEVPKTGDSLALARRQARSVRRLIRRRAHRLLRLRRLLKREGVLLSADFNENGLVRGLPIDAWALRVAGLDRKLSNKEWAAVLLHLVKHRGYLSQRKNETQSKDKELGRLLAGVNGNREALQNRSDEYRTAAELAVKKFAAENNGSLRNKGGDYSHTFDRKDLQRELHLLFERQRALDNPFTSSEMEAAVDELLMKQRSALQGEAVLKMLGRCTFEPSEYKAAKNTYSAERFVWLTKLNNLRIQYNGEERALSEAERRLLLDEPYQKAKLTYKQVRTILELPESAVFKGLRYGHGEDGLKAESGTLMEMKAYHAVRKALKDAGLEGEWENRIRNPELLDAIGTAFSLYKTDEDIRANLAAFRLSENVLEALLAGLNFDKFVHLSLKALAKILPLMEQGMRYDEACKEAYGDHYGAKEQEDHRLLPPFVADDIRNPVVFRTLTQARKIVNEIVRRYGSPLRVHIETGREVGKSFSDRKEIEKRQEENRKERERAAAHFKELFPNFAGEPKAQDILKLRLYEQQHGKCLYSGKEIDLRRLPEKGYVEIDHALPFSRTWDDSFNNKVLVLGKENQDKRNRTPYEYLDGKGNSGAWRAFAERVSGCRFPYAKKQRLLTQKLDEKTEQGFLERNLNDTRYVARFLCQFIEEKMHLEGAGKKRVFASNGQITALLRGFWGLKKVREENDRHHALDAVVVACSSVSMQQKITRHFRYREELEHIDRETGEVIHGFPQPWEFFRQEVMTRVFSDDPVSELAEKLDSRPEAVHEFVTPLFVSRAPHRKVTGQGHLETIRSAKRLDEKISVVKLPLTQLKTKDIERIVGYPNREPALYDALAARLAAFKDDPAKAFSEPFYKTGKDGKCGVLVKAVRVENVQKSGLLVRKDESGKMQGVADNATMVRVDVFGKNGKNYLVPVYAWQVEKGELPNRAVVAYADEEDWDEMDDSFEFKFSLYPNDLVEVVTKKDKFFGYYSGFNRATGAINIKEHDLSKSKVKNGVYEGIGVKTAQSFQKYQVDTLGKTIRLCKPEKRMGFKKK

SEQ ID NO: 211 - protein, 1029 aa, Alicycliphilus denitrificans; identical to SEQ ID NO: 188

SEQ ID NO: 212 - protein, 1122 aa, Streptococcus suis; identical to SEQ ID NO: 82

SEQ ID NO: 213 - protein, 1428 aa, Parasutterella excrementihominis
MGKTHIIGVGLDLGGTYTGTFITSHPSDEAEHRDHSSAFTVVNSEKLSFSSKSRTAVRHRVRSYKGFDLRRRLLLLVAEYQLLQKKQTLAPEERENLRIALSGYLKRRGYARTEAETDTSVLESLDPSVFSSAPSFTNFFNDSEPLNIQWEAIANSPETTKALNKELSGQKEADFKKYIKTSFPEYSAKEILANYVEGRRAILDASKYIANLQSLGHKHRSKYLSDILQDMKRDSRITRLSEAFGSTDNLWRIIGNISNLQERAVRWYFNDAKFEQGQEQLDAVKLKNVLVRALKYLRSDDKEWSASQKQIIQSLEQSGDVLDVLAGLDPDRTIPPYEDQNNRRPPEDQTLYLNPKALSSEYGEKWKSWANKFAGAYPLLTEDLTEILKNTDRKSRIKIRSDVLPDSDYRLAYILQRAFDRSIALDECSIRRTAEDFENGVVIKNEKLEDVLSGHQLEEFLEFANRYYQETAKAKNGLWFPENALLERADLHPPMKNKILNVIVGQALGVSPAEGTDFIEEIWNSKVKGRSTVRSICNAIENERKTYGPYFSEDYKFVKTALKEGKTEKELSKKFAAVIKVLKMVSEVVPFIGKELRLSDEAQSKFDNLYSLAQLYNLIETERNGFSKVSLAAHLENAWRMTMTDGSAQCCRLPADCVRPFDGFIRKAIDRNSWEVAKRIAEEVKKSVDFTNGTVKIPVAIEANSFNFTASLTDLKYIQLKEQKLKKKLEDIQRNEENQEKRWLSKEERIRADSHGICAYTGRPLDDVGEIDHIIPRSLTLKKSESIYNSEVNLIFVSAQGNQEKKNNIYLLSNLAKNYLAAVFGTSDLSQITNEIESTVLQLKAAGRLGYFDLLSEKERACARHALFLNSDSEARRAVIDVLGSRRKASVNGTQAWFVRSIFSKVRQALAAWTQETGNELIFDAISVPAADSSEMRKRFAEYRPEFRKPKVQPVASHSIDAMCIYLAACSDPFKTKRMGSQLAIYEPINFDNLFTGSCQVIQNTPRNFSDKTNIANSPIFKETIYAERFLDIIVSRGEIFIGYPSNMPFEEKPNRISIGGKDPFSILSVLGAYLDKAPSSEKEKLTIYRVVKNKAFELFSKVAGSKFTAEEDKAAKILEALHFVTVKQDVAATVSDLIKSKKELSKDSIENLAKQKGCLKKVEYSSKEFKFKGSLIIPAAVEWGKVLWNVFKENTAEELKDENALRKALEAAWPSSFGTRNLHSKAKRVFSLPVVATQSGAVRIRRKTAFGDFVYQSQDTNNLYSSFPVKNGKLDWSSPIIHPALQNRNLTAYGYRFVDHDRSISMSEFREVYNKDDLMRIELAQGTSSRRYLRVEMPGEKFLAWFGENSISLGSSFKFSVSEVFDNKIYTENAEFTKFLPKPREDNKHNGTIFFELVGPRVIFNYIVGGAASSLKEIFSEAGKERS

SEQ ID NO: 214 - protein, 1371 aa, Lactobacillus buchneri
MKVNNYHIGLDIGTSSIGWVAIGEDGKPLRIKGKTAIGARLFQEGNPAADRRMFRTTRRRLSRRKWRLKLLEEIFDPYITPVDSTFFARLKQSNLSPKDSRKEFKGSMLFPDLTDMQYHKDYPTIYHLRHALMTQDEKFDIRMVYLAIHHIVKYRGNFLNSTPVDSFKASKVNFVDQFKKLNELYTAINPEESFQINLANSEDIGHQFLDPSIRKFDKKKQIPKIVPVSVDDKATDKINGKIASEIINAILGYKSKLDVVVQCTPVDSKSWALKFDEEDIDAKLQKILPEMDENQQSIIAILQNLYSQVTLNQIVPNGMSLSESMIEKYNDHHDHLKLYKKIIDQLADPKKKAALKKAYSQYVGDDGKVIEQADFWSSVKKNLDDSDLSKQIMDLIDAEKFMPKQRTSQNGVIPHQLHQRELDEIIEHQSKYYPWLAEINPNKHDLHLAKYKIEELVAFRVPYYVGPMITPDDQAKSAETVFSWMERKGKEAGQITPWNFDEKVDRNASANRFIKRMTTKDTYLIGEDVLPDESLLYEKFKVLNELNMVRVNGKLLKVADKQAIFQDLFENYKHISVKKLQNYIKSKTGLPSDPEISGLSDPEYFNNSLGTYNDFKKLFGNKVDEPDLQDDFEKIVEWSTVFEDKRILREKLNEITWLSDQQKDVLESSRYQGWGRLSKKLLTGIVNDQGERIIDELWNTNKNFMQIQSDNDFAKRIHEANADQMKAVDVEDVLADAYTSPQNKKAIRQVVKVVDDIQKAMGGVAPKYISIEFTRSEDRNPRRTISRQRQLENTLKDTAKSLAKSINPELLSELDNAAKSKKGLTDRLYLYFTQLGKDIYTGKPINIDEISTYDIDHILPQAFVKDDSLNNRVLVSKAINNGKSDNVPVQLFGAKMGHFWKQLAEAGLISKRKLKNLQTDPDTISKYAMHGFIRRQLVETSQVIKLVANILGDKYRNDNTKIIEITARMNHQMRDEFGFIKNREINDYHHAFDAYLTAFLGRYLYHRYIKLRPYFVYGDFKKFKEDKVTMRNFNFLHDLTDDTQEKIADAETGEVIWDRENSIQQLKDVYHYKFMLISHEVYTLRGAMFNQTVYPASDAGKRKLIPIKADRPINVYGGYSGSADAYMAIVRIHNKKGDKYRVVGVPMRARDRLDAAKKVSDADCDRALKDVLTPQLTKTKKSRKTGEITQVVEDFEIVLGKVMYRQLMIDGDKKFMLGSSTYQYNAKQLVLSDQSVKTLASKGRLDPLQESMDYNNVYTEILDKVNQYFSLYDMNKFRHKLNLGFSKFISFPNHNVFDGNTKASSGKREILEEVLNGLHANPTFGNLKDIGITTPFGQLQQPNGILLSDEAKIRYQSPTGLFERTVSLKDL

SEQ ID NO: 215 - protein, 1090 aa, Sphingomonas sp.
MDWRLGLDLGANSLGWAALRLDRAGDPIGILAMGSRIFSDGRDPKSGASLAVDRRAARAMRRRRDRFKQRQAALLKYLIRDGLFPADQADRQRLADEDPYALRARALDEELSLFEIGRALFHLNQRRGFQSNRKADRGQDDEAGKIAVGVDRLNQQMEEQGARTLGEFLHQRRRAATDANHIPSVRTRLRPETGEGAKGDGYDFYPSRALIAEEFEEIWAAQAPHYPDTLTQQVHDRLYEIIFHQRPLRAPQVGQCTLVAGETRLPKAHPLFQKRRLLEEINALMIVRPGEIAQRLTPEERDTLYLKLKDKRTVSFATLRKTLKLDSAARFNKESENRTELKGDEVAAELGAKTRLGTRWQHLSGDQQWEVVHRLMALESQADEAAFRDWISQTYDLLPEQAAAVLGARLPQGHGRFGPTATTTLIDSLLHDRTEDGRVVVYSEAVQRSGLGHHSDLRHDRDDEDVTELPYYGVALERHIMPGTAEPTDPEEMRIGRLTNPTVHIGLNQLRHVVNRLIRAYGPPKEIAIELARELKLSEDEKKKRNSENRDNRLAAEGRSKKLEEIRQRDTGANRALLKLWEELNPGNVLDRRCIYTGEQISIDMLFSDRVEVDHILPFAQTLDDSNGNKLLCLREANREKRRRSPYEAWGHTDRWPDIAERASRLPKPKRWRFEPDAMQRFATEDGFLARHLVDTQYLGRLAREYLSWLYPGRGEGSGHVWVSPGRLTEMVRRKLGLNDLLPDHNFGGGADQPKNRLDHRHHAIDALVVAIVDRGMLQAIARASGQDGSEGRERIHIPAPWDGFRDDLRVAVNGIIVSHRPDHGTVAKAGLARGRDQTAGRLHNDTAYGLTGETDAKGNSIVVRRIPLSAIKKPADIARVRDPLLRNALAEFTKGLDGKAFEARIGRFHELGPLLYRGIRRVRVVETLTVIPIRDAEGRAYKGYKGDSNYRYDVWEMPDGKWRCQVVSMFDAHQSTEQARPHPAARKILSLQRNDILAIERTEGDRELVRVVKFSEKQFAVAPPHEGGSLKTRDGNADDPFRYLYPSPNTLKGWRARQVRIDELGRVLDPGFPARKSVRRTRPRAAPVD

SEQ ID NO: 216 - protein, 1000 aa, Kingella kingae
MARAQRRLISRRANRMNKLRRLLKQENVLQANDYDEKGLIIGLPNQAWELRAQGLDRKLEPKEWAAVLINLVKHRGYLSQRKNESQTADKELGALLSGMNHNHQLLQSQSNQYRTPAELAIKQFATQDGHIRNQRGAYTHTFNRLDLQNELNQLFDAQTRLGNPHVSGSLKTAINDLLMNQKAALSGDAILEMLGRCTFEPSEYKAAKNTYSAERFVWLGKLTNLRIQDNGLESALSREQRELLLNEPYNKTKLTYQQVRKLLRLPETAFFKGLRYGKDNAESATFMEMKSYHAIRKSLENKSLKSEWEKLKTQPKLLDLIGTAFSIYKTDDEIAGCLKNQLPENVIIALQEQLNFSNFMELSLKALEKLLPLMEQGLRYDEACTQIYGNRHEKIADKTEKFLPNIPADKLRNPVVLRTLTQARKVINAIIRRYGSPARVHIETGREVGKSFSDRDKLKKQQEENQEQRRRAIDEWKQFFPNAAHEPKAVDILKLRLYQLQQGKCLYSGLPIDVRRLPEKGYVEIDHALPFSRTWDDSFNNKILVLASENQNKGNQTPYEYLRGADNSESWRLFVENVQNCQFSPNKKQKIMAKQLDEKGFLERNLNDTRYVSRFLCQFISEHLHLTGKGKKRVFASNGQITALLRGRWGLSKNREENDRHHAVDAVVVACSTVAMQQKITQFVRYQKGNVFTGERIDKETGEVISIHFPTPWEHFREEVMIRVFDDNPLRTLPEKLPNRPEALHEYVMPLFVSRMPTRKMTGQGHKETIKSAKRLDEKISVLRVPLTQLKLNDLENMVNREREPALYEALKARLEQFKNDPAKAFAEPFFKQGGQQVKAVRVEIVQKSGMLLRKINGVADNGSMVRVDVFEKSGKFYLVPIYAWQVAEGILPNYAVVAHKDESDWILMDESYHFKFALYKNDLLEVQTKKGGIMGYFASLDRATGAITIREHDRDKKKCKDGEHRSIGVKMASSFKKLQVDELGKNIHETRSRKRPNIG

SEQ ID NO: 217 - protein, 1130 aa, Streptococcus pasteurianus
MTNGKILGLDIGIASVGVGIIEAKTGKVVHANSRLFSAANAENNAERRGFRGSRRLNRRKKHRVKRVRDLFEKYGIVTDFRNLNLNPYELRVKGLTEQLKNEELFAALRTISKRRGISYLDDAEDDSTGSTDYAKSIDENRRLLKNKTPGQIQLERLEKYGQLRGNFTVYDENGEAHRLINVFSTSDYEKEARKILETQADYNKKITAEFIDDYVEILTQKRKYYHGPGNEKSRTDYGRFRTDGTTLENIFGILIGKCNFYPDEYRASKASYTAQEYNFLNDLNNLKVSTETGKLSTEQKESLVEFAKNTATLGPAKLLKEIAKILDCKVDEIKGYREDDKGKPDLHTFEPYRKLKFNLESINIDDLSREVIDKLADILTLNTEREGIEDAIKRNLPNQFTEEQISEIIKVRKSQSTAFNKGWHSFSAKLMNELIPELYATSDEQMTILTRLEKFKVNKKSSKNTKTIDEKEVTDEIYNPVVAKSVRQTIKIINAAVKKYGDFDKIVIEMPRDKNADDEKKFIDKRNKENKKEKDDALKRAAYLYNSSDKLPDEVFHGNKQLETKIRLWYQQGERCLYSGKPISIQELVHNSNNFEIDHILPLSLSFDDSLANKVLVYAWTNQEKGQKTPYQVIDSMDAAWSFREMKDYVLKQKGLGKKKRDYLLTTENIDKIEVKKKFIERNLVDTRYASRVVLNSLQSALRELGKDTKVSVVRGQFTSQLRRKWKIDKSRETYHHHAVDALIIAASSQLKLWEKQDNPMFVDYGKNQVVDKQTGEILSVSDDEYKELVFQPPYQGFVNTISSKGFEDEILFSYQVDSKYNRKVSDATIYSTRKAKIGKDKKEETYVLGKIKDIYSQNGFDTFIKKYNKDKTQFLMYQKDSLTWENVIEVILRDYPTTKKSEDGKNDVKCNPFEEYRRENGLICKYSKKGKGTPIKSLKYYDKKLGNCIDITPEESRNKVILQSINPWRADVYFNPETLKYELMGLKYSDLSFEKGTGNYHISQEKYDAIKEKEGIGKKSEFKFTLYRNDLILIKDIASGEQEIYRFLSRTMPNVNHYVELKPYDKEKFDNVQELVEALGEADKVGRCIKGLNKPNISIYKVRTDVLGNKYFVKKKGDKPKLDFKNNKK

SEQ ID NO: 218 - protein, 1119 aa, Lactobacillus coryniformis
MGYRIGLDVGITSTGYAVLKTDKNGLPYKILTLDSVIYPRAENPQTGASLAEPRRIKRGLRRRTRRTKFRKQRTQQLFIHSGLLSKPEIEQILATPQAKYSVYELRVAGLDRRLTNSELFRVLYFFIGHRGFKSNRKAELNPENEADKKQMGQLLNSIEEIRKAIAEKGYRTVGELYLKDPKYNDHKRNKGYIDGYLSTPNRQMLVDEIKQILDKQRELGNEKLTDEFYATYLLGDENRAGIFQAQRDFDEGPGAGPYAGDQIKKMVGKDIFEPTEDRAAKATYTFQYFNLLQKMTSLNYQNTTGDTWHTLNGLDRQAIIDAVFAKAEKPTKTYKPTDFGELRKLLKLPDDARFNLVNYGSLQTQKEIETVEKKTRFVDFKAYHDLVKVLPEEMWQSRQLLDHIGTALTLYSSDKRRRRYFAEELNLPAELIEKLLPLNFSKFGHLSIKSMQNIIPYLEMGQVYSEATTNTGYDFRKKQISKDTIREEITNPVVRRAVTKTIKIVEQIIRRYGKPDGINIELARELGRNFKERGDIQKRQDKNRQTNDKIAAELTELGIPVNGQNIIRYKLHKEQNGVDPYTGDQIPFERAFSEGYEVDHIIPYSISWDDSYTNKVLTSAKCNREKGNRIPMVYLANNEQRLNALTNIADNIIRNSRKRQKLLKQKLSDEELKDWKQRNINDTRFITRVLYNYFRQAIEFNPELEKKQRVLPLNGEVTSKIRSRWGFLKVREDGDLHHAIDATVIAAITPKFIQQVTKYSQHQEVKNNQALWHDAEIKDAEYAAEAQRMDADLFNKIFNGFPLPWPEFLDELLARISDNPVEMMKSRSWNTYTPIEIAKLKPVFVVRLANHKISGPAHLDTIRSAKLFDEKGIVLSRVSITKLKINKKGQVATGDGIYDPENSNNGDKVVYSAIRQALEAHNGSGELAFPDGYLEYVDHGTKKLVRKVRVAKKVSLPVRLKNKAAADNGSMVRIDVFNTGKKFVFVPIYIKDTVEQVLPNKAIARGKSLWYQITESDQFCFSLYPGDMVHIESKTGIKPKYSNKENNTSVVPIKNFYGYFDGADIATASILVRAHDSSYTARSIGIAGLLKFEKYQVDYFGRYHKVHEKKRQLFVKRDE

SEQ ID NO: 219 - protein, 1126 aa, Lactobacillus farciminis
MADRISLGLDIGVASVGFSVLDIDKGKVIELGARLFSATVAAGNQDRRDMRGARRLLNRNKQRRQDTGKLFKKFGLIDDFDKGSFYDNFNQNLNPYELRVKGLTEQLTKEELAESLYQIVKHRGISYALKDADVDEGGTDYSVSLKINSQELAEKTPAQIQLQRLNDYGKVRGQVVIGDDPDNQKVLLNVFPTSAYEKEAKQIIATQQQFYPESLTDKFTEEYCQILTRKRDYFVGPGNEKSRTDYGIYKTDGRTLDNLFEELIGHDKIYPEELRASAASYTAQLFNVLNDLNNLRILNYEDGKLTKEDKEKIIAEIKNNTTTINMLNVIKKVAGCSKDDIKGFRVNEKDKPEISSMPVYRKIHKDLLKAGVDISDWPVEFIDELSFILTLNTENGEIRKQLNNRLAPKFDFLNADLIQLIIDNKDSFEIKTNNKWHRFSVKTMNKLIPEMMERPVEQMTLLNEMGLVKKDKKRFENNKYLPYKEIAKDIFNPVASKSVREALKIVNAVLKKYGHIDYLVVEMPRDKNLKEEQDNIKEFQNKNKKAKDAAFEAFVKSVGSEQRVKEALSKNRKLQMKMRLWYQQQEIDPYNGKTIDATDLINNPDKFEIDHIIPQSISFYDSINNKTLCFASMNQVKGQKTPYEFMLEGHGQSYDKFKATVMANKNFGKAKRANYLFEENVSDIETRKRFLSRNLVDTRYSSRVVLNSLQDFFREKSADTKVTVIRGKFTSNMRKHWHIDKTRETFHHHAIDASIIAATPFLRMWKKGGTIFPVKVGEESIDIETGEILDDKNFDKAMYEEPYSGFVSEIMNADDRIKFSHQVDKKMNRKVSDATIYSTRTGKLAKDKKDAEYIVAKVKDIYSVDGFKKFKKVYDKDKTKFLLYKYDPRTFSKLERIISDCPDKVEKVQTNGKVKAVDISPFEMYRRDHGMIKKYSKKGNGPAIKQLKYLDKKLGSHIDITPANANGKHVILQSLKPWRTDVYLNHETGEYEIMGIKYSDLKFNKNEGYGIKKDKYLEIKKVEEVSEKSEFMFSLYRKDRVKVQDMKTGESVELLFWSRNFSNKKYAELKPISQAENDKKLPVYGKGRLIKRLIPKNCKIWKVNTTILGDPYYLEKESDSPKDILD

SEQ ID NO: 220 - protein, 1380 aa, Eggerthella sp.
MNLRHVGNYNIGLDMGTASVGWAAIDEQGELLHFKGKPTWGSRLFDSANTAATARMPRGQRRRYIRRRWRLDLLQKFFSEEMAEKDPEFFIRLRQSSLWPEDREGGHTAYHWPLFNDSDFNEKEYYEKFPTIFHLRQWLMETDEKADIRLIYLAFHNIVKHRGNFLQENNDSLSAQNANMRESLESFCIALEEWCDEKELTCSCDPQKLEHLFKEVKYRSDIRDGFAALLGLACSGENEVDVKAMAKEMGKAIVGYKADFSKIFTECDKEGSSFRLSDDEGPEAFLDICPDDGIALFEAIQMVYSSFILTGMLTEKGLSLSKISAYNQYGQDLESLKALVKEYVPNEYSSFFRGPTYSGSTEYDPSKAQGYTRYNLGPSKKGSGAKPMAYEDFKKSVEQLFANTNAINDERYKEMMGRFAEEKFLRRLRTSDNGRIPFQLNLEEMTAIIINQGKYYPFLLEQQEKLESLVRFRIPYYVGPLTRINARLDSKGNACFAWSKRKDGMDSASIKPWNWDEVIDKHASAQAFIERMTGTCTYLRGEPVLPRCSLLYEEYCVLNELNGARWTQDGDKFIRFDYKDRSDIIEELFKKRRGRIQYAAVADWMKQERSHANVHVSGGQGENAFESRLSSYHFFCNDVFGVDELPGSYVDMVEEIILWSTLFEDRSILREEIQRKYGDVLNEEQIKTICKKRFSGWGRLSRKLLCSLKAQTDNGPKSIMDILQEGDQNNGRVGRAMVFQEILHDEQLGFEQKIEEENTQSMLEGENLLIEDLPGSPAIRRSINQAVRIVDEIVGIAGHAPDNIFIEVTREDDTKKKGKRTTTRYSNIQKALEALKEEGAEALRELKTYKHNELDKRLSLYFMQNGKSLYSGIPLDIRRLSEYQIDHIIPQSYIKDDSYENMALVLPGENQSKADNLLISQDIRIKMKATWTALHKAGLMGDKKYNNLMNSSISDAKMKGFINRQLVETSQSVKLTQMMLSQKYPGAKVRPIKASISSQLRDACDLVKCREANDYHHAHDAYLACQVGRFVLKRHSSMFDNPIGMTKVIRDFVKRQGQEFKRNGKLPAYASRSGFIVQSFMRSGFDAETGELLRDDWNAPFEIARIKRCLNYRDCYISRMPMEDSGAFWDATIYSPKAGKKGALPVKQGLPVEKYGSYSREQFAYFFVYKAYNPKKKAYRLEFEAVPVRVASAVETRENALEEYAKSVAKQAGLEFVEVARPKVYKYQLIELGEDRLYITGKREVRNASQLAFSLDEIDLLKRLAEGEETSSEERERLFDVLIEKYARYAPRLARQLSVDSMSATFETLNAEEQLGILLSLVEIANGKRNMIDLSSAGGSKNAGCMNPTFSSELSSPGSNFTFIDQSVTGMFERRQRLEL

SEQ ID NO: 221 - protein, 1430 aa, Capnocytophaga canimorsus
MKHILGLDLGTNSIGWAVVKEAQNDNEQSEIVDVGVRVNPLTTDEKTNFEKGKPISTNADRTLKRSARRNLQRYKLRRKELIELLKEHQLISTDTILTENGKGTTFQTLELRAKSAKEKISLEELARVFLTINKKRGYKSSRKAKNEDEGQLIDGMEIAKRLYEENLTTGQLSLQLLKEGKKSLPDYYRSDLQFELDKVWNFQKQFHSHILTDEFYAQLKGKGQRATSALFLAKYQIYTAENKGSREDKKLQAYQWRVDALSKELTREQLAFVITEINNNLNNSSGYLGAISDRSKELYFNNETVGEYLWKQIAANPHTSLKNQVFYRQDYLDEFEQIWKTQSAFYPEILTDELKKELRDVVIFYQRKLKSQKSLVSFCEFENKEIEIKKEDGTSTKKVIGLKVAPKSSPLFQEFKIWQNLNNVLIRKKGSKTKKVDKNQQAVLFEEEKTIFELDLEAKQALFNELNLKGNLKAYYCLEILGYSPKEWEMNYSVLEGNRTNKALYEAYLKITDLEGYDAKNHLKVKLNKDEVELDDLKVPASEIKDMVQAIFKEAGINTDILHFNAELDGKDFENQASYQLWHLLYSYEGDDSKSGNELLYKLLETKFGFKKEYAQILANVSLSDDYGSLSTKAMRKIHPYIKENKFSTACELAGYRHSKHSLTKEENDNRVLKDSLEVLKKNSLRQPVVEKILNQMINLVNALLKKYRTENPNFKFDEIRIELARELKKNAEERANMTVNINKAKTEHEKIIKILKNEFGLPNPTRNDIIRYRLYEELKANGYKDLYTNEYIEKQDLFTKNIDIEHIIPKSRVFDDSFSNKTLSFRKTNLDKGERTAFDYIESKFGADKLEEYVARVEDLYKNNIISKAKYQKLLKKESEIGDGFVERDLRETQYIAKKAKEILLQITPNVLSTSGGITDRLREDWDLINVMKELNLPKYRALGLTQMEDRKYGQQVEVIIDWTKRNDHRHHAMDALTVAFTKHNHIQYLNYLNARKNEKHREHSNIMGIQQLETIKVTDKNGNEKRVFKAPMPNFRQVTKAFLENVLISHKAKNKVVTKNKNKVAGSNKVQEVLTPRGQLHKETVYGKYQYYVQKEEKIGGKFDLETIKKVANPLYQSLLKKRLEENGGDPKKAFTGKNSLAKNPIYLDDAQTEQLPEKVKLVWLENSFSIRKDITPENFKDEKLIDKILDEGVKRILKERLQSFGNDAKKAFSDLDKNPIWLNKEKGIAIKRVAISGVANAEPLHTKKDHLGKEILDKEGKSIPVDFISTGNNHHVAVYRDEKGNLQEKVVSVFEAVVRANQGLPIIDKTYNQHLGWEFLFTMKQNEMFVFSNESTGFNPNDIDLLDPKNKKIISPNLFRVQKFSKLQYGNSFVREFVFRHHLETTVEDRKELQGITYKQMKNSAFFNDIIKVRINHLGGIVSVGEY

SEQ ID NO: 222 - protein, 1348 aa, Finegoldia magna
MKSEKKYYIGLDVGTNSVGWAVTDEFYNILRAKGKDLWGVRLFEKAKTAADTRTFRSGRRRNDRKGVRLQILREIFEDEIKKVDKDFYDRLDESKFWAEDKKVSGKYSLFNDKNFSDKQYFEKFPTIFHLRKYLMEEHGKVDIRYYFLAINQMMKRRGHFLIDGQISHVTDDKPLKQQLILLINDLLKIELEEEFMDSIFEILADVNEKKTEKKNILKELINAQDFNKQEGKILYSIFESIVTGKAKIKNIISDEDILEKIKEDNKEDFVLTGDSYEENLQYFEEVLQENITLFNTLKSAYDFVILQSILKGKSTLSDAQVERYDEHKKDLEILKKVIKKYDEDGKLFKQVFKEDNGNGYVSYIGYYLNKNKKITAKKKISNIEFTKYVKGILEKQCDCEDEDVKYLLGKIEQENFLLKQISSINSVIPHQIHLFELDKILENLAKYYPSFNNKKEEFTKIEKIRKTFTFRIPYYVGPLNDYHKNNGGNAWIFRNKGEKIRPWNFEKIVDLHKSEEEFIKRMLNQCTYLPEETVLPKSSILYSEYMVLNELNNLRINGKPIDTDVKLKLIEELFKKKTKVTLKSIRDYMIRNNFADKEDFDNSEKNLEIVSNMKSYIDFNNILGDKFELEMVEDLIEKITIHTGNKKLLKKYIEETYPDLSSSQIQKIINLKYKDWGRLSRKLLDGITGTNIETGEIDTVINFLRNSSDNLMQIIGSQNYSFNNDIDKLRKKYIPQEISYEVVENLYVSPSVKKMIWQVIRITEEITKVMGYDPDKIFIEMAKSEEGKKTTISRKNKLLALYKAIKKDERDSQYEKLLTGLNKLDDSDLRSRKLYLYYTQMGRDMYTGEKIDLDKLFDSTHYDKDHIIPQSMKKDDSIINNLVLVNKNANQTTKGNIYPVPSSIRNNPKIYNYWKYLMEKEFISKEKYNRLIRNTPLTNEELGGFINRQLVETRQSTKAIKELFEKFYKKSKIIPVKAILASDLRKDMNTLKSREVNDLHHAHDAFLNIVAGDVWNREFTSNPINYVKENREGDKVKYSLSKYFTRPRKSKGKVIWTPEKGRKLIVDTLNKPSVLISNESHVKKGELFNATIAGKKDYKKGKIYLPLKKDDRLQDVSKYGGYKAINGAFFFLVEHTKSKKRIRSIELFPLHLLSKFYEDKNTVLDYAINVLQLQDPKIIIDKINYRTEIIIDNFSYLISTKSNDGSITVKPNEQMYWRVDEISNLKKIENKYKKDAILTEEDRKIMESYIDKIYQQFKAGKYKNRRTTDTIIEKYEIIDLDTLDNKQLYQLLVAFISLSYKTSNNAVDFTVIGLGTECGKPRITNLPDNTYLVYKSITGIYEKRIRIK

SEQ ID NO: 223 - protein, 1352 aa, Megasphaera sp.
MKKRNREEYYVGLDIGTSSVGWAVATPDYRIPKFRGHKMWGSRLFAEGKRAAERRQFRTNRRRLARRRDRLQILEELFAEEMAKVDNTFFMRLKESKFFLEDKTVKEKHILFSTDKFDADRFYKDNPTIYHVRKRLMEEEPQDIRELFLAVHHILKYRGHFLFAGSLEQNGASIEELVRTLLGKQGLAILDDTIDSNEMVNILKNTGETKSDRKKDVQELWNPLKDKVKKAQAAEMAGLVLGLKSDISKLFANSDYKDLDSSIKNINFSSGDYEEKRDDYANSIGDDIVLLDTMKALYDTLILSQILQGKRSISAAKVEDYNTHKEQLRALKAILKPHKRLYNEMFRENNKKDLSNYVAYISSYSEGKRVNREGFYKYVQAVLKQVDDSDSKQAILEAIRLETFLPLLRVKDNAVIPHQIHQAELEAILETARKKYNFLNDVSDGVSVKDKIIQLFTFRIPYYVGPLNPHSGETVADRKQGTGWVVRKQRGKVYPWNFADMVDVKASAEAFITNLTNKCTYLIGEDVLPKRSLLYSEFMLLNELNMIKYDGHELPVAIKQLYIEQVFKQEHKKQTKGRVLDFLKRNGLITGSATAVITGMDDAIKGDLQSYRDMVRIFGAGFDHSMAERIIRWVTLFGEAKDILENKIREVYGNSISDSQMRAIKKLKYADWGRLSQAFLIAVKGCDKSGVERNIITCLRASSQNLMEILSDQGTYIKQIKAWNHQHTTNMMDTLDYQLVDDLYVAPSVKRSIWQSLCIVEELVKIMGQAPKKIFVEVTRTKQAEKTKKDSRKKRLVELYTAIGKEGAAWKKEIEAHQAGDFRRKKLYLYYTQMGRCMYSNEPIAMDALFTSAYDIDHIYPQSLTKDGSWDNLVLVKSQLNKEKSDQYPLRPAIREKNKAHWQYLCRAGFISEKKYERLMRTTELTAEELSGFIARQLVETSQATKAVTGLLERIYTNTEICFVKAETVSQFRHQHNFIKIRELNNYHHAKDAYLNIVVGNVYHEKFTKNPWEFIARSTERRPYNLNRMYDFDLLKQGRVIWQVPKSLETVQAMMKSNDVRITKKLLVQKGELYDATITKAHKAKEGTYFPLKGADARLRDVHRYGGYEKIKIAYYSVFSCREKASNTIHTLIIPIPVYKAGLLQTEADLTAYAWQTKQKTKPIKDIYSAITPIYKKLCINTVVKIDGFKYFLGGKTGDYMWLDPAIPVVLDEQAAAYLKAISKVGRADDVENTAQAIDLITAEANEAFYDVLLKKMEAKIFAKAYQTIVEKLASETARERFRELSIGAQCSCLLEILNLLANNKTTFTFFKDKMGVTMSRRKQPMDLTKLEECIVYETSITGLYEKAVSLL

SEQ ID NO: 224 - protein, 650 aa, Haemophilus pittmaniae
MENKNLHYILGLDLGIASVGWAVVEIDKEENPLCLIDVGVRTFERAEVPKTGESLALSRRLARSARRLTQRRVARLKKAKRLLKLENILLSTDERLPHQVWQLRVEGLDRKLKRQEWAAVLLHLIKHRGYLSQRKNESKSENKELGALLSGVASNHELLQQTTYRTPAELAVKKFEVEEGHIRNQQGAYTHTFSRLDLLAEMELLFSRQQHFGNPFASEKLLENLTALLMWQKPALSGEAILKMLGKCTFEDEYKAAKNTYTAERFVWITKLNNLRIQENGLERALNDNERLILIEQPYEKAKLTYAQVRSILNLSDEAIFKGLRYSGEDKKAIETKTTLMEMKAYHQIRKVLEGNNLKAEWTELKENSTLLDEIGTAFSLYKTDEDISTYLAGKLSQPVLNALLENLSFDKFIQLSLKALYKLLPLMQQGLRYDEACHEMYGDHYGKKTYGKKTEENHYFLPQIPADEIRNPVVLRTLTQARKVINGVVRLYGSPARIHIETGREVGKSYKDRRELEKRQEENRKQRENAIKEFKEYFPHFAGEPKAKDILKMRLYKQQNAKCLYSGKPIELHRLLEKGYVEVDHALPFSRTWDDSFNNKVLVLANENQNKGNLTPFEWLDGKHNSERWRAFKALVETSAFPYAKNNAS

SEQ ID NO: 225 - protein, 1062 aa, Ralstonia syzygii
MAEKQHRWGLDIGTNSIGWAVIALIEGRPAGLVATGSRIFSDGRNPKDGSSLAVERRGPRQMRRRRDRYLRRRDRFMQALINVGLMPGDAAARKALVTENPYVLRQRGLDQALTLPEFGRALFHLNQRRGFQSNRKTDRATAKESGKVKNAIAAFRAGMGNARTVGEALARRLEDGRPVRARMVGQGKDEHYELYIAREWIAQEFDALWASQQRFHAEVLADAARDRLRAILLFQRKLLPVPVGKCFLEPNQPRVAAALPSAQRFRLMQELNHLRVMTLADKRERPLSFQERNDLLAQLVARPKCGFDMLRKIVFGANKEAYRFTIESERRKELKGCDTAAKLAKVNALGTRWQALSLDEQDRLVCLLLDGENDAVLADALREHYGLTDAQIDTLLGLSFEDGHMRLGRSALLRVLDALESGRDEQGLPLSYDKAVVAAGYPAHTADLENGERDALPYYGELLWRYTQDAPTAKNDAERKFGKIANPTVHIGLNQLRKLVNALIQRYGKPAQIVVELARNLKAGLEEKERIKKQQTANLERNERIRQKLQDAGVPDNRENRLRMRLFEELGQGNGLGTPCIYSGRQISLQRLFSNDVQVDHILPFSKTLDDSFANKVLAQHDANRYKGNRGPFEAFGANRDGYAWDDIRARAAVLPRNKRNRFAETAMQDWLHNETDFLARQLTDTAYLSRVARQYLTAICSKDDVYVSPGRLTAMLRAKWGLNRVLDGVMEEQGRPAVKNRDDHRHHAIDAVVIGATDRAMLQQVATLAARAREQDAERLIGDMPTPWPNFLEDVRAAVARCVVSHKPDHGPEGGLHNDTAYGIVAGPFEDGRYRVRHRVSLFDLKPGDLSNVRCDAPLQAELEPIFEQDDARAREVALTALAERYRQRKVWLEELMSVLPIRPRGEDGKTLPDSAPYKAYKGDSNYCYELFINERGRWDGELISTFRANQAAYRRFRNDPARFRRYTAGGRPLLMRLCINDYIAVGTAAERTIFRVVKMSENKITLAEHFEGGTLKQRDADKDDPFKYLTKSPGALRDLGARRIFVDLIGRVLDPGIKGD

SEQ ID NO: 226 - protein, 1052 aa, Haemophilus parainfluenzae
MENKNLHYILGLDLGIASVGWAVVEIDEKENPLRLIDVGVRTFERAETQKGESLALSRRSARSARRLTQRRVARLKKAKRLLKSENILLSTDERLPHQVWQLRVEGLDRKLERQEWAAVLLHLIKHRGYLSQRKNESKSENKELGALLSGVASNHELLQQATYRTPAELAVKKFEVEEGHIRNQQGAYTHTFSRLDLLAEMELLFSRQQHFGNPFASEKLLENLTALLMWQKPALSGEDILKMLGKCTFEDEYKAAKNTYTAERFVWITKLNNLRIQENGLERALSDNERLMLIEQPYEKAKLTYAQVRSILNLSDDAIFKGVRYSGEDKKAIETKTTLMEMKAYHQIRKVLEGNNLKAEWVALKANPTLLDEIGTAFSLYKTDEDISAYLAGKLSQPVLNALLENLSFDKFIQLSLKALYKLLPLMQQGLRYDEACREIYGDHYGKKTEETHHFLPQIPADEIRNPVVLRTLTQARKVINGVVRLYGSPARIHIETGREVGKSYKDRHELKKRQEENRKQREKTISEIKTLFPNFSGEPKGKDILKMRLYYQQNAKCLYSGKPLELHRLFEQKYVEVDHALPLSRTWDDSFNNKVLVLANENQNKGNLTPFEWLDGKNNSERWRTFKALVETSAFPYAKKQRILSQKLDEKGFIERNLNDTRYVARFLCNFIADNMHLTGEGKRKVFASNGQITALLRRRWGLAKSREDNDRHHALDAVLVACSTVAMQQKITRFVRFKAGDVFTGERIDRETGEIIPLHFPTPWQFFKQEVEIRIFSDNPKLELENRLPDRPQANHEFVQPLFVSRMPTRKMTGQGHMETVKSAKRLNEGISMIKMPLTKLKLKDLELMVNREREKDLYDALKTRLEAFNDDPAKAFAEPFMKKGGAIVKSVRVEQVQKSGVLVRQGNGVADNASMVRVDVFTKDGKYFLVPIYTWQVAKGILPNKAVIQGKDEEDWEDIDDATFQFSLHPNDLISVKTKKDEFLGYFNGLNRHTGGINIRTHDLEKSKGKQGIFEGIGVKIALSFEKYQIDELGKNIRLCKPSKRQPVR

SEQ ID NO: 227 - protein, 1331 aa, Lactobacillus sanfranciscensis
MNKQPYNIGLDIGTSSVGWSATELDNRLLHIKGHNGIGVRLFKEGESAADRRGFRTTRRRLARRKWRLRLLNEIFATEIAKVDPSFFARLKQSNVSPKDPNKTMFENILFDDENLDDQKFHHDYKTIYHLRQAIINHPEQKFDIRLIYLAMHHIIKYRGHFLNQANVQDFKGGKIDLEKSFKALNDIFENQGRDLRLVTDKANQYVKVLSDNAKTRSDRKKELSKLLYVPIDKDTDKNSKKVTGEILKAILGNKAKFDVIFGIEVENPKEWVLTFNSDDFDDKIEGLSSQMTDEDSEILLILKELYFALNLSDILNNSVTDKNAKTLSEAMINRYDDHKNQLAMLKKVIDSSDKKHAKELKEAYSAYIDGENNKKISFEDLKKRIQKNLVDSELSQKINDLLDHDYFLPKQRSKENGAIPHQLQQQELDQIIESQKQYYPFLAELNPNEKRSRQAKYKLDELVAFRVPYYVGPMVEVTDSNQENNGKFAWMIRKEQGEITPWNFDEKVDRTETATKFITRMTTTDTYLIGEPVLPKNSLLYQKFVVLNELNNLKINQEIITPGQKQYLYEHVMKKNKRVTLKKIADALVIKGDYPYAPEVKGTTDQKNLNNGLTTYIDLAKIFGNELDDVDREADFEKIIEWSTIFEDQHIFALKLQELKWLTEKQRNQVVKLRYQGWGKLSKELLAGLVDDNGQRIIDLLWSDNQNFMQIVNQKSFKESIADHNGAHLEEKNLKDVINDLYTSPQNKKAIRQVILVVDDIINAVGYEPANIMMEFAREDSNDHRLTNSRSRQLENVYKDITNSWFDNDSVKDELEDKIKNKDKFTDRLYLYFTQGGKDLYTGEPLNIDDLSSYDIDHILPQSFILDNSLDNRVLTSQRNNRVSKEDQLPGELFGTKMHAFWKRLKAAHLISNKKYYNLTLTPNSISKFNNQGRFINRQLVETRQVIKLAAEILHNRYSEEKGTNIVTIKANLTHHMREKFNFYKNRNVNDYHHAFDAYLTAFVGNWLLQQYPKLKPYFVYGDFAKTEINNLKSFNMLYKFEQAHQLNEKDGKIAKDADALLGYMKNVYHFKKMLVTKKLETNHGALFKQTLYPSPAHDIKKRQLIKPKDNRPTDIYGGYTHEERKYMSLVKVIGKKDNEYRMANVPLLKINKNNDIKEILKSQFSNKKFEIVLPKVLKNQLFSENGALFVIGSKGYKYNANQLVLSDLDMKLLNDLSNNKSIDEVTINQLFKNIVDSTNKYMPLYEIKNLNEVVEKFNNLEFNDKKKTITDFLLATHANPTMSNLKNIGLPSYFGRFTSGNAGIKLSENANVIYQSPTGLFSRKVKISDF

SEQ ID NO: 228 - protein, 1473 aa, Flavobacterium branchiophilum
MAKILGLDLGTNSIGWAVVERENIDFSLIDKGVRIFSEGVKSEKGIESSRAAERTGYRSARKIKYRRKLRKYETLKVLSLNRMCPLSIEEVEEWKKSGFKDYPLNPEFLKWLSTDEESNVNPYFFRDRASKHKVSLFELGRAFYHIAQRRGFLSNRLDQSAEGILEEHCPKIEAIVEDLISIDEISTNITDYFFETGILDSNEKNGYAKDLDEGDKKLVSLYKSLLAILKKNESDFENCKSEIIERLNKKDVLGKVKGKIKDISQAMLDGNYKTLGQYFYSLYSKEKIRNQYTSREEHYLSEFITICKVQGIDQINEEEKINEKKFDGLAKDLYKAIFFQRPLKSQKGLIGKCSFEKSKSRCAISHPDFEEYRMWTYLNTIKIGTQSDKKLRFLTQDEKLKLVPKFYRKNDFNFDVLAKELIEKGSSFGFYKSSKKNDFFYWFNYKPTDTVAACQVAASLKNAIGEDWKTKSFKYQTINSNKEQVSRTVDYKDLWHLLTVATSDVYLYEFAIDKLGLDEKNAKAFSKTKLKKDFASLSLSAINKILPYLKEGLLYSHAVFVANIENIVDENIWKDEKQRDYIKTQISEIIENYTLEKSRFEIINGLLKEYKSENEDGKRVYYSKEAEQSFENDLKKKLVLFYKSNEIENKEQQETIFNELLPIFIQQLKDYEFIKIQRLDQKVLIFLKGKNETGQIFCTEEKGTAEEKEKKIKNRLKKLYHPSDIEKFKKKIIKDEFGNEKIVLGSPLTPSIKNPMAMRALHQLRKVLNALILEGQIDEKTIIHIEMARELNDANKRKGIQDYQNDNKKFREDAIKEIKKLYFEDCKKEVEPTEDDILRYQLWMEQNRSEIYEEGKNISICDIIGSNPAYDIEHTIPRSRSQDNSQMNKTLCSQRFNREVKKQSMPIELNNHLEILPRIAHWKEEADNLTREIEIISRSIKAAATKEIKDKKIRRRHYLTLKRDYLQGKYDRFIWEEPKVGFKNSQIPDTGIITKYAQAYLKSYFKKVESVKGGMVAEFRKIWGIQESFIDENGMKHYKVKDRSKHTHHTIDAITIACMTKEKYDVLAHAWTLEDQQNKKEARSIIEASKPWKTFKEDLLKIEEEILVSHYTPDNVKKQAKKIVRVRGKKQFVAEVERDVNGKAVPKKAASGKTIYKLDGEGKKLPRLQQGDTIRGSLHQDSIYGAIKNPLNTDEIKYVIRKDLESIKGSDVESIVDEVVKEKIKEAIANKVLLLSSNAQQKNKLVGTVWMNEEKRIAINKVRIYANSVKNPLHIKEHSLLSKSKHVHKQKVYGQNDENYAMAIYELDGKRDFELINIFNLAKLIKQGQGFYPLHKKKEIKGKIVFVPIEKRNKRDVVLKRGQQVVFYDKEVENPKDISEIVDFKGRIYIIEGLSIQRIVRPSGKVDEYGVIMLRYFKEARKADDIKQDNFKPDGVFKLGENKPTRKMNHNQFTAFVEGIDFKVLPSGKFEKI

SEQ ID NO: 229 - protein, 933 aa, Mycoplasma iowae
SVRDYSDGPGSEKSPTPYGLWRLNKEGKVEKIGENLWDVLVGKCTIYGNDDSIKDEKTKLRGGKNSPIAEVFNFINDLTNIYLFSSSKLKLNSKTKLSILDEFNISLKTSKPIKSFSEKKLVKHIISTTEFKDINFDDVYGYRIDTSKKPLFTKLENTITIAKWLLDNNVYNELNIYDQEDLIKINNIFVILQKSMDINKRAQLVSDEYKIDLPICLELVKKIKGVMQTHSFSYKAMLEYIPVGIKYNDLETGEDTSINASTYFVDKINNLNTKLLFNGRPRKYIPKNIFEDGIISPTSKRAFIQTINVLNKIIKVYSKDYDIDNIAIELPRDKNTAEERKKISSNQKKAGEEIAEVLKFAGLNVEEYTSKLNSKTKLKLKLLKEQNYKDIYDGQEIDVIDVIKNSNKYHEEHIIPYSLCFIDSRRNKVLTKFENNKQKGNKTPFQWLSSIGKYAEFKDRVEKLFVEQKISKAKKELLLFEQDPRTEMLGFIEKNLSDTRYASKLVFDTFRDFFKVNNPNVKIKVINGALTNYARYNLFATYKDGLLERKGIMKQREFYEHHGIDATILAFLGSNHKINQLLKLSHKFKKQDDNKIYDENTGELIEFTKDFLSDEARKKAMELSKQIFEIPCKFSRPIYRKSNVSFSNETLISMKWIDDKYTKGVKINKLSLVNKDLDLNEYFADYETNEMKNLICYQEDKTLYNKLKNIYDKYNNFVENSNIKPVKNPFINYMISNFSSDDSKIQNFKHIIFYDHKGNKKFVKSLKVCGDEKNLSNIVLRKDQKDIMNSKKIKKSGILESLNPISARIYKDNKGKYITIPINSLVLNWTKKGLEIDNEKLCNILKSKNIFNNQFIEINAGQSIINNENKLFYFVGGGDFKVNKLEIKSQFCDNEIFFPRKQMNISIATIIDNYKLCEVDELGKIYNIRKIVL

SEQ ID NO: 230 - protein, 1358 aa, Acidaminococcus intestini; identical to SEQ ID NO: 94

SEQ ID NO: 231 - protein, 983 aa, Campylobacter jejuni
MARILAFDIGISSIGWAFSENDELKDCGVRIFTKAENPKTGESLALPRRLARSARKRLARRKARLNHLKHLIANEFKLNYEDYQSFDESLAKAYKGSLISPYELRFRALNELLSKQDFARVILHIAKRRGYDDIKNSDDKEKGAILKAIKQNEEKLANYQSVGEYLYKEYFQKFKENSKEFTNVRNKKESYERCIAQSFLKDELKLIFKKQREFGFSFSKKFEEEVLSVAFYKRALKDFSHLVGNCSFFTDEKRAPKNSPLAFMFVALTRIINLLNNLKNTEGILYTKDDLNALLNEVLKNGTLTYKQTKKLLGLSDDYEFKGEKGTYFIEFKKYKEFIKALGEHNLSQDDLNEIAKDITLIKDEIKLKKALAKYDLNQNQIDSLSKLEFKDHLNISFKALKLVTPLMLEGKKYDEACNELNLKVAINEDKKDFLPAFNETYYKDEVTNPVVLRAIKEYRKVLNALLKKYGKVHKINIELAREVGKNHSQRAKIEKEQNENYKAKKDAELECEKLGLKINSKNILKLRLFKEQKEFCAYSGEKIKISDLQDEKMLEIDHIYPYSRSFDDSYMNKVLVFTKQNQEKLNQTPFEAFGNDSAKWQKIEVLAKNLPTKKQKRILDKNYKDKEQKNFKDRNLNDTRYIARLVLNYTKDYLDFLPLSDDENTKLNDTQKGSKVHVEAKSGMLTSALRHTWGFSAKDRNNHLHHAIDAVIIAYANNSIVKAFSDFKKEQESNSAELYAKKISELDYKNKRKFFEPFSGFRQKVLDKIDEIFVSKPERKKPSGALHEETFRKEEFYQSYGGKEGVLKALELGKIRKVNGKIVKNGDMFRVDIFKHKKTNKFYAVPIYTMDFALKVLPNKAVARSKKGEIKDWILMDENYEFCFSLYKDSLILIQTKDMQEPEFVYYNAFTSSTVSLIVSKHDNKFETLSKNQKILFKNANEKEVIAKSIGIQNLKVFEKYIVSALGEVTKAEFRQREDFKK

SEQ ID NO: 232 - protein, 1338 aa, Streptococcus macacae
MTKPYSIGLDIGTNSVGWAVVTDGYKVPAKKMKVLGNTDKSHIKKNLLGALLFDSGNTAKDRRLKRTARRRYTRRRNRILYLQEIFAEEMAKADESFFQRLNESFLTNDDKEFDSHPIFGNKAEEEAHHHKFPTIFHLRKHLADSTEKSDLRLIYLALAHMIKFRGHFLIEGQLKAENTNVQTLFDDFVEVYDKTVEESHLSEISVSSILTEKISKSRRLENLIKYYPTEKKNTLFGNLIALSLGLQPNFKTNFKLSEDAKLQFSKDTYEEDLGELLGKIGDNYADLFISAKNLYDAILLSGILTIDDNTTKAPLSASMIKRYEEHQEDLAQLKKFIRQNLPDQYSEVFSDKTKDGYAGYIDGKTNQEAFYKYIKNMLSKTEGADYFLDKIDREDFLRKQRTFDNGSVPHQIHLQEMHAILRRQGEYYPFLKENQDKIEKILTFRIPYYVGPLARKGSRFAWAEYKADKKVTPWNFDDILDKEKSAEEFITRMTLNDLYLPEEKVLPKHSLVYETFNVYNELTKVKYVNEQGKAIFFDANMKQEIFDHVFKENRKVTKDKLLNYLNKEFEEFRIVNLTGLDKENKAFNSSLGTYHDLRKILDKSFLDDKVNEKIIEDIIQTLTLFEDREMIRQRLQKYSDIFTTQQLKKLERRHYTGWGRLSAKLINGIRDKQSNKTILGYLIDDGYSNRNFMQLINDDSLPFKEEIARAQVIGETDDLNQLVSDIAGSPAIKKGILQSLKIVDELVKVMGHNPANIVIEMARENQTTAKGRRSSQQRYKRLEEAIKNLDHDLNHKILKEHPTDNQALQNDRLFLYYLQNGRDMYTEDPLDINRLSDYDIDHIIPQSFIKDDSIDNKVLVSSAKNRGKSDNVPSEDVVNRMRPFWNKLLSCGLISQRKYSNLTKKELKPDDKAGFIKRQLVETRQITKHVAQILDARFNTKRDENKKVIRDVKIITLKSNLVSQFRKDFKFYKVREINDYHHAHDAYLNAVIGKALLDVYPQLEPEFVYGEYPHFHGYKENKATAKKFFYSNIMNFFKKDDIRTDENGEIVWKKDEHISNIKRVLSYPQVNIVKKVEIQTVGQNGGLFDDNPKSPLEVTPSKLVPLKKELNPKKYGGYQKPTTAYPVLLITDTKQLIPISVMNKKQFEQNPVKFLRDRGYQQVGKNDFIKLPKYTLVDIGDGIKRLWASSKEIHKGNQLVVSKKSQILLYHAHHLDSDLSNDYLQNHNQQFDVLFNEIISFSKKCKLGKEHIQKIENVYSNKKNSASIEELAESFIKLLGFTQLGATSPFNFLGVKLNQKQYKGKKDYILPCTEGTLIRQSITGLYETRVDLSKIGED

SEQ ID NO: 233 - protein, 1265 aa, Mycoplasma ovipneumoniae
MHNKKNITIGFDLGIASIGWAIIDSTTSKILDWGTRTFEERKTANERRAFRSTRRNIRRKAYRNQRFINLILKYKDLFELKNISDIQRANKKDTENYEKIISFFTEIYKKCAAKHSNILEVKVKALDSKIEKLDLIWILHDYLENRGFFYDLEEENVADKYEGIEHPSILLYDFFKKNGFFKSNSSIPKDLGGYSFSNLQWVNEIKKLFEVQEINPEFSEKFLNLFTSVRDYAKGPGSEHSASEYGIFQKDEKGKVFKKYDNIWDKTIGKCSFFVEENRSPVNYPSYEIFNLLNQLINLSTDLKTTNKKIWQLSSNDRNELLDELLKVKEKAKIISISLKKNEIKKIILKDFGFEKSDIDDQDTIEGRKIIKEEPTTKLEVTKHLLATIYSHSSDSNWININNILEFLPYLDAICIILDREKSRGQDEVLKKLTEKNIFEVLKIDREKQLDFVKSIFSNTKFNFKKIGNFSLKAIREFLPKMFEQNKNSEYLKWKDEEIRRKWEEQKSKLGKTDKKTKYLNPRIFQDEIISPGTKNTFEQAVLVLNQIIKKYSKENIIDAIIIESPREKNDKKTIEEIKKRNKKGKGKTLEKLFQILNLENKGYKLSDLETKPAKLLDRLRFYHQQDGIDLYTLDKINIDQLINGSQKYEIEHIIPYSMSYDNSQANKILTEKAENLKKGKLIASEYIKRNGDEFYNKYYEKAKELFINKYKKNKKLDSYVDLDEDSAKNRFRFLTLQDYDEFQVEFLARNLNDTRYSTKLFYHALVEHFENNEFFTYIDENSSKHKVKISTIKGHVTKYFRAKPVQKNNGPNENLNNNKPEKIEKNRENNEHHAVDAAIVAIIGNKNPQIANLLTLADNKTDKKFLLHDENYKENIETGELVKIPKFEVDKLAKVEDLKKIIQEKYEEAKKHTAIKFSRKTRTILNGGLSDETLYGFKYDEKEDKYFKIIKKKLVTSKNEELKKYFENPFGKKADGKSEYTVLMAQSHLSEFNKLKEIFEKYNGFSNKTGNAFVEYMNDLALKEPTLKAEIESAKSVEKLLYYNFKPSDQFTYHDNINNKSFKRFYKNIRIIEYKSIPIKFKILSKHDGGKSFKDTLFSLYSLVYKVYENGKESYKSIPVTSQMRNFGIDEFDFLDENLYNKEKLDIYKSDFAKPIPVNCKPVFVLKKGSILKKKSLDIDDFKETKETEEGNYYFISTISKRFNRDTAYGLKPLKLSVVKPVAEPSTNPIFKEYIPIHLDELGNEYPVKIKEHTDDEKLMCTIK

SEQ ID NO: 234 - protein, 1535 aa, Flavobacterium columnare
MTKILGLDLGTNSIGWAIRDTENEGINQILDKGARIFSEGVKSENGKEISRAAERTAYRSARKIKYRRKLRKYETLKVLSINGMCPLSVEEVEQWKKSGFKEYPLNPEFLDWLRTNEDKNINPYLFRDKASKQKVTLFELGRALYHIAQRRGFLSNRLDQSAEGVFEEHNPQIQNLIEDLDSSNTILNELKEYYINLGIIDETEKSGFKKDLDEGEKKLKSLYNSLVAITKKNANDIETCKQELIARLNKKEDLGKVKGKIKDISQAMLDRNFKTLGQYFFSLYNKERIRNQYTSREEHYLEEFIIICQTQGIEGINTNEKLPEKKFTGLAKDLYRAIFFQRPLKSQKGLIGKCSFEKNKSRCAVSHPDYEEFRMWSYLNTIKIGTQSEKTLRFLTLEEKLKLVPKFYRKSDFNFEVLAKELVEKGASFGYYKSSKKNEFFYWFNYKPTDSVSACVVSASLENAIGKDWKIKTFEYQTRNTEKNEVTKSVDYKDLWHLLSVATSDTYLYDFAIEKLKLEPKNAKAFSKTKLKKDFASLSLAAIAKILPYLKQGLLYSHAVFMANIENIVDADIWKDEEQQKFIQSKIVELVDNYIVEKSKLELINGLLKIYNTEDKEGRKVYYSKEAESLFEADLRKKLVPFYKANIIIEEHEQEIIFQDLFPILMDQLKKQEFIKIGRLDKQIEAFLEGENEEGQIFCNHTDKLKKLYHPSDIEVFKKKTIKDEWGNEKVVLGSPLTTSIKNPMAMRALHQLRKVLNTLIANDQIDEDTRIHIEMARELNDANKRKGIQDFQNENKKFREEAIKEIKKLYLEECHKDVNPTEDDILRYQLWLEQGKCEIYEEGNNISICDIIGSNPSYDIEHTIPRSISQDNSQMNKTLCSLKFNRSIKKQKMPVELSNYNDILPRIAHWKKEAEELTRQIETISRSIKSAATKVAKDKNIRKRHYLTLKRDYILGKYERFTWEEPKVGFKNSQIPDTGIITKYAQAYLKSYFKRVESVKGGAVAEFRKLWGIQESFIDENWWKHYKDKDRDKHTHHTIDAITIACMPKDKYDLLAHAWRLEDEQDKKAAKVLIEQAKPWKTFKEDIEKIETEILVSHFTPDNVKKQSKSIIKNRGKKVYVLKNELPVNFKNKIEGKDYFKLKFDSKILYKIPKKKEKQTDTFYEELPKNYLNGVEGKDYFKINTTGKTFYKIPIFNQGDTIRGSLHQETTYGAIKLPDIDIETKKPLHTDKGGFILKKDIKGNEIVFFVVRKEISKISENDVQNIVDNVVRKKIENAIANSLITFKIVKKKKVAVIKEGVTIWMREPNIEKGIEGIPIKKVRIITNSVKNPIEIKVHSPLSKSRHKHKQKVYGQNDENYAMALYELDGKREFELINNFNLAKLLKQSQSYYPLHKEKEIKGKKILVPIEKRNNKDVILKRGQQVVFYDKTVENPKDISEIIDFRERIYIIEGLTIQRQKDKKTSKVNEYGIIQLRHFKEARKSEEISKDNFKPDGEFKINENKPTRKMNHNQFTAFVEGIDFKVLPSGKFQKI

SEQ ID NO: 235 - protein, 1459 aa, Flavobacterium columnare
MKFNLGLDIGTNSIGWALVNEDYENKKGKIIAAGSRIIPMTQDILDKFGSGAITETQTALRTDYRSKRKLIQRFLLRRERLHRVLNVLDFLPKHYAESIDFEKYFGKFLPNTEPKLAYNQNQFIFQNSFLEMLKEFQEKHPELLTNNKKIPYDWTIYYLRKKALNQRIEKEELAWLLLQFNQKRGYNQLRDEEEESVPNKQVEFYSLKIIDVVADQPKEGRDKRWYSINLENGWTYRRESKTPLFNWEGKTKDFIVTTDLNQDGSIKKDKEGKEKRSFRAPSEGDWTLLKKKTEKEIYESGKTLGTYIYDALLNTPDLKIKGDFIRTIDRSIYKEELQQIINKQKEYHLELNSSKLYKACLEELYPKNEIYKSALKNKDIAYLFINDILYYQRPLKAPKYNIGKCTYESRTFKKEDKKIREYIPAVAKSHPLFQEFRLWQWIKNLKIYEKLSSDNCTDFFLTNEQDFENLFEFLWNKKEIDHKGILEYLVKTKFPDLKPKQVKTKVKEYRWNYVYDHEKDESKTYPCGETYFLLKNKLDKIYNAQDDFLDKERLYNLWHIIYSVTDKKQYEKALAKFALKNHLDTKSFVNTFKRIPPFKNDYAIYSLKAIKKLLPLMRVGKYWNYDDIDPITKQKIQCIITGEENDTISTLVREKTNHFSNENDFKNLPLWLAGYIVYNSHNESSEIEKWKSPQDIDTFLKKFKQHALRNPIVEQVVTETLRVVRDIWSKKGQGKKDFFNEIHIELGKDLKNPVDKRRKLSSTNTKNESTNTRIKALLIELFTQGVENVKPNSPKHQEILKIFEEGALNSGIEIEEDIIKISNTDQPTKKQLELYILWLEHKYKSPYTGQSIPLSKLFTPNYEIEHIIPRSKYYDDNLSNKVICETEINRLKNNQLGYEFINNHEIREVTLEEGKTIRLLSPEQYWNFVTTYYAKNKAKRENLLLKELPVQMVEKQLNDTRYVSKYVMQLLSKIVRKEDGTDNGINSTNILSISGKMTRALKNDWDLNDVWNDLLLYRFERLNTITKTNLFTTYSEQKQKRMPIVPDQYAKGFHKKRLDHRHHALDAIVIACITRNHINYMNNQNIQGEKLKKNAIEKENYREILQKSRLDIRAQLCEKKYNDNDPTKYNWVFIKPWADFTENTKDILESIIPSFKQNLRIINKTVNYYEKYNENGKKVKVRQIKGDNWAIRKPLHKETISGKVHLSYKTPAKGKILTATRKVLDSSMDFKSIEKITDTGIQKILKNYLEYKKSPELAFSPEGIEELNATITKYNNGFHHKPIYKVRIYEEGVKFPLGNKGNKKSKYVEAEKGTNLFFAIYKDQENNRYFETIPFNDVLETLKKGMSAVPEKNQEENTLVFALSPQDLVFVPTLDEIENPDIVDFKNLTKDQTNRIYKMVSSSGKQCFFIKAEVATSIVNKMEFSTSNKMENSIEGIQIKSNCWKLKLDRLGTITRVIK

SEQ ID NO: 236 - protein, 1389 aa, Oenococcus kitaharae
MARDYSVGLDIGTSSVGWAAIDNKYHLIRAKSKNLIGVRLFDSAVTAEKRRGYRTTRRRLSRRHWRLRLLNDIFAGPLTDFGDENFLARLKYSWVHPQDQSNQAHFAAGLLFDSKEQDKDFYRKYPTIYHLRLALMNDDQKHDLREVYLAIHHLVKYRGHFLIEGDVKADSAFDVHTFADAIQRYAESNNSDENLLGKIDEKKLSAALTDKHGSKSQRAETAETAFDILDLQSKKQIQAILKSVVGNQANLMAIFGLDSSAISKDEQKNYKFSFDDADIDEKIADSEALLSDTEFEFLCDLKAAFDGLTLKMLLGDDKTVSAAMVRRFNEHQKDWEYIKSHIRNAKNAGNGLYEKSKKFDGINAAYLALQSDNEDDRKKAKKIFQDEISSADIPDDVKADFLKKIDDDQFLPIQRTKNNGTIPHQLHRNELEQIIEKQGIYYPFLKDTYQENSHELNKITALINFRVPYYVGPLVEEEQKIADDGKNIPDPTNHWMVRKSNDTITPWNLSQVVDLDKSGRRFIERLTGTDTYLIGEPTLPKNSLLYQKFDVLQELNNIRVSGRRLDIRAKQDAFEHLFKVQKTVSATNLKDFLVQAGYISEDTQIEGLADVNGKNFNNALTTYNYLVSVLGREFVENPSNEELLEEITELQTVFEDKKVLRRQLDQLDGLSDHNREKLSRKHYTGWGRISKKLLTTKIVQNADKIDNQTFDVPRMNQSIIDTLYNTKMNLMEIINNAEDDFGVRAWIDKQNTTDGDEQDVYSLIDELAGPKEIKRGIVQSFRILDDITKAVGYAPKRVYLEFARKTQESHLTNSRKNQLSTLLKNAGLSELVTQVSQYDAAALQNDRLYLYFLQQGKDMYSGEKLNLDNLSNYDIDHIIPQAYTKDNSLDNRVLVSNITNRRKSDSSNYLPALIDKMRPFWSVLSKQGLLSKHKFANLTRTRDFDDMEKERFIARSLVETRQIIKNVASLIDSHFGGETKAVAIRSSLTADMRRYVDIPKNRDINDYHHAFDALLFSTVGQYTENSGLMKKGQLSDSAGNQYNRYIKEWIHAARLNAQSQRVNPFGFVVGSMRNAAPGKLNPETGEITPEENADWSIADLDYLHKVMNFRKITVTRRLKDQKGQLYDESRYPSVLHDAKSKASINFDKHKPVDLYGGFSSAKPAYAALIKFKNKFRLVNVLRQWTYSDKNSEDYILEQIRGKYPKAEMVLSHIPYGQLVKKDGALVTISSATELHNFEQLWLPLADYKLINTLLKTKEDNLVDILHNRLDLPEMTIESAFYKAFDSILSFAFNRYALHQNALVKLQAHRDDFNALNYEDKQQTLERILDALHASPASSDLKKINLSSGFGRLFSPSHFTLADTDEFIFQSVTGLFSTQKTVAQLYQETK

SEQ ID NO: 237 - protein, 1425 aa, Prevotella micans
MIQKIFGLDLGTNSIGSSVRNLELGENLTEQLEFFSSDIFGSSVSKNSNGREYSLAGNRSAHRRSRGLNEARRRKLWATLDLLIEHGLCPMSPDSLMQWRTYDKQKGLYRQYPIEDKDFNAWIMLDFNGDGKPDYSSPYQLRRELVVRQFDFDQPIERYKLGRALYHIAQHRGFKSSKGETIADQEKNEKKPIAEEGADIANEMKASETKLSKGLVAYMQENHLKTVGEAFAKLEDERVRIRNNESYRAIRSQYQDEIKEIFTYQKKLSVESELYERLTSEKKGVGTIFYKRPLRSQRGNVGKCTLERNKPRCPIGRPEFEEFRAWTLINNIKIRETAGEPYKQLPIKLRQELLKDCFLSKVKADFKFEDIRKYIEKRLGLSFSNDDKTINYKDSVSIAACPVTVRMKKLLGENWANCRIDGEKRRQAHGKNNNNEHIVSYTEEDIWHVCYNAEDPEEVSNFARKALHWDENKIKELVRLWTSIPQGYAMLSLKAIRNINRMLLLGLKYSDAVLLAKLPDIVPVSDEDILAITKEFLQLEDKLNQEKQINNIVNSLIANYKSKLEENRFADHNYQYQLGEGDDEDINTQIKSHIGAKLWVQIGADEQTKIFQAVRSKYQDFFKSYKRKFVESPKLGELLVAFLTEKFPNVKSKQWERLYHPSQIAIYRPIPVDNDRSKLRLGNPNIGAIKNPTVMRVLNTLRRRVNQLLDDGVISPDETRVVVETARELNDANTKWALDRYNRIRRDENEKIRKILKELNPTTNSISEQDIDKARYIFEQCETDFYTDGKVPYYNKDIKKYKLWLEQGGQCLYTGQTINLTNLFNPNAFDMEHTIPKSISFDNSDQNLTLCESYYNRFIKKNNIPTDMPNYDKDVTINGKEYTAIKPRLQRWKERVDRLSRNVDFWKGQARRAQDKDRKDECIREKHLWDMELAYWKGKLERFTMTDVTDGFKNSQLVDTRVITRHAVLYLKSIFNHVEVQRGETTAEFRKILGLQSIDEKKDRSLHSHHAIDATMLTVIPSAAKRDRMLELFYKIEETKKALKNYNDNNKTGLNLELKGLEEKLDKEKKDCRVGRRVNDLDRFINENIIVSHHTKDQALTPAHRRLRKRGKIVGGKEHPRWQTGDSLRGEIHKASYYGAITQFAKDANGKVLMKDGQAQIDPTIYYVIRRELKYKRSTQDSGFTNWEDLEKVIVDTDLFGLMKGQFPEGTSFKDACEQGFYMIKKGKNGEGDVKTHRIRHVRCKAVKTALRIKEQTYKSSKDYKQFFYAAVGDLYVMCYYTDGKKRDFKIYSLYDISNHRKSGTEDIPKFITDKKGNHLPLDYKLRTGDMVLLYKDNPEELKDLDQVNLKRRLYKVNRFESEGLIILLTHHLSTTTERGCSIGKIENYQNLPTAIRCGIKTIKFLIMGKHRDFVIRNGNIEFKH

SEQ ID NO: 238 - protein, 1473 aa, Mucilaginibacter paludis
MKNILGLDLGTNSIGWALIEKDTDQKNGNILGTGSRIIPMSQDIKDEFGKGNSISQTADRTKFRSVRRLRERHLLRRERLHRVLNVLGFLPKHYADQIDFKKRLGKLVNETEPKLVYDNKNFIFKKSFEAMLSDFNQHQPLLLADGKKVPFDWTIYYLRKKALTEKIEKEELAWLILNFNQKRGYYQLRGEEEEENPNKMVAFHSLKIVEVIADESQKGKAETWYSLILENGWIYRRSSKTPLYDWKGKQRDFIVTTDLNDDGSIKTDKEGLEKRSFRAPVEDDWTLVKKKTEQEINRSHKTVGTYIYENLLQDPKQKIKGKLVRTIEREFYKDELKMILKNQQKFHPELNDEHLYINCVRELYRNNQAHQTILSKKDFVHLFIDDIIFYQRPLRSQKSSISNCTLEFRKYKNENGTDQTDYLKAIPKSHPLFQEFRLWQWIYNLGIYQKEDDTNVTDELIKNIDGYQDLFDFLNNKKEIRQDILIKFLVEQTGLKGKPLSSVVAKYRWNFVEDKIYPCNETGTQIRTRLAKVENTPEDFLTAETEIKLWHIIYSVNDKADYEKALKTFAEKHNLDTHSFVENFKKFPPFKSEYGSFSEKAIKKLLPLIRLGKYWSWENIDKKTQERIEKILTGEFDEAIKSRVRDKAIHLTEEDHFQGLQLWLASYVVYGRHSEADNLDKWHTVADLEDYLAEFRQHSLRNPIVEQVITETLRVVKDIWLQYGQGAKDFFSEIHIELAREMKNTGDERKRLTSLVTDNENTNLRIKVLLSELLNDGNVENVRPYSPMQQEALKIFEDGVLNSDIEIEDDILKISKMAQPTNTELKRYKLWLEQKYRSPYTGQIIPLNRLFTADYEIEHIIPQSRFFDDSFSNKIICESAVNQLKDKQLGLEFIKNHSGTIVKLGMGKTAKILDVESYNEFVKGNYTKNISKRNKLMLEEIPDKMIERQLNDTRYISKFIISALSNIVRSESNDDGFNSKNVLPGNGKITSRLKQDWGMNDIWNELILPRFERMNKITDSAVFTAWNENNQKFLPIVPLEFSKGFQKKRIDHRHHALDALVIAASTREHINLLNNEHAKSDKRFDLNRKLRKFEKVAYNDPKTGKRIEKEVPTIFLKPWETFTVDAKNSLESIIVSFKQNLRVINRATNYSESYNDENGALRLGKDGNPLKEKIKQSKGDSWAIRKPMHKDFVYGKVHLQNVKLPKDKFITAIRKSLDVTFDLKRIETITDTGIQKILKNYLHSKENKVELAFSPEGIEDMNQHIERYNDGKKHQPIHKVRVFEIGSRFSLGESGNKKTKFVEAAKGTNLFFAVYQDDNKGKRNYETIPLNIVIERQKLGLHSVPTEDAKGGKLLFHLSPNDMVYVPTSEELEDNLASVNIKRLNTAQRKRIYKVEKASGVECYFIRQDIAYLIKNYDAKTKIGELESQNKLQTTMTDDRLKITDVCVKLNIDRLGSIAETFLGNQYGASKKT

SEQ ID NO: 239 - protein, 1365 aa, Filifactor alocis
MTKEYYLGLDVGTNSVGWAVTDSQYNLCKFKKKDMWGIRLFESANTAKDRRLQRGNRRRLERKKQRIDLLQEIFSPEICKIDPTFFIRLNESRLHLEDKSNDFKYPLFIEKDYSDIEYYKEFPTIFHLRKHLIESEEKQDIRLIYLALHNIIKTRGHFLIDGDLQSAKQLRPILDTFLLSLQEEQNLSVSLSENQKDEYEEILKNRSIAKSEKVKKLKNLFEISDELEKEEKKAQSAVIENFCKFIVGNKGDVCKFLRVSKEELEIDSFSFSEGKYEDDIVKNLEEKVPEKVYLFEQMKAMYDWNILVDILETEEYISFAKVKQYEKHKTNLRLLRDIILKYCTKDEYNRMFNDEKEAGSYTAYVGKLKKNNKKYWIEKKRNPEEFYKSLGKLLDKIEPLKEDLEVLTMMIEECKNHTLLPIQKNKDNGVIPHQVHEVELKKILENAKKYYSFLTETDKDGYSVVQKIESIFRFRIPYYVGPLSTRHQEKGSNVWMVRKPGREDRIYPWNMEEIIDFEKSNENFITRMTNKCTYLIGEDVLPKHSLLYSKYMVLNELNNVKVRGKKLPTSLKQKVFEDLFENKSKVTGKNLLEYLQIQDKDIQIDDLSGFDKDFKTSLKSYLDFKKQIFGEEIEKESIQNMIEDIIKWITIYGNDKEMLKRVIRANYSNQLTEEQMKKITGFQYSGWGNFSKMFLKGISGSDVSTGETFDIITAMWETDNNLMQILSKKFTFMDNVEDFNSGKVGKIDKITYDSTVKEMFLSPENKRAVWQTIQVAEEIKKVMGCEPKKIFIEMARGGEKVKKRTKSRKAQLLELYAACEEDCRELIKEIEDRDERDFNSMKLFLYYTQFGKCMYSGDDIDINELIRGNSKWDRDHIYPQSKIKDDSIDNLVLVNKTYNAKKSNELLSEDIQKKMHSFWLSLLNKKLITKSKYDRLTRKGDFTDEELSGFIARQLVETRQSTKAIADIFKQIYSSEVVYVKSSLVSDFRKKPLNYLKSRRVNDYHHAKDAYLNIVVGNVYNKKFTSNPIQWMKKNRDTNYSLNKVFEHDVVINGEVIWEKCTYHEDTNTYDGGTLDRIRKIVERDNILYTEYAYCEKGELFNATIQNKNGNSTVSLKKGLDVKKYGGYFSANTSYFSLIEFEDKKGDRARHIIGVPIYIANMLEHSPSAFLEYCEQKGYQNVRILVEKIKKNSLLIINGYPLRIRGENEVDTSFKRAIQLKLDQKNYELVRNIEKFLEKYVEKKGNYPIDENRDHITHEKMNQLYEVLLSKMKKFNKKGMADPSDRIEKSKPKFIKLEDLIDKINVINKMLNLLRCDNDTKADLSLIELPKNAGSFVVKKNTIGKSKIILVNQSVTGLYENRREL

SEQ ID NO: 240 - protein, 1130 aa, Streptococcus macedonicus
MTNGKILGLDIGIASVGVGIIEAKTGKVVHANSRLFSAANAENNAERRGFRGSRRLNRRKKHRVKRVRDLFEKYGIVTDFRNLNLNPYELRVKGLTEQLTNEELFAALRTISKRRGISYLDDAEDDSTGSTDYAKSIDENRRLLKTKTPGQIQLERLEKYGQLRGNFTVYDENGEAHRLINVFSTSDYEKEARKILETQADYNKKITAEFIDDYVEILTQKRKYYHGPGNEKSRTDYGRFRTDGTTLENIFGILIGKCNFYPDEYRASKASYTAQEYNFLNDLNNLKVPTETGKLSTEQKESLVEFAKNTAILGPAKLLKEIAKILDCKVDEIKGYREDDKGKPDLHTFEPYRKLKFNLDSVNIDYLSREVLDKLADILTLNTEREGIEDAIKRNLPNQFTEEQISEIINVRKSQSTAFNKGWHSFSAKLMNELIPELYATSDEQMTILTRLEKFKVKKKSSKNIKTIDEKEITDEIYNPVVAKSVRQTIKIINAAVKKYGDFDKIVIEMPRDKNADDEKKFINKRNKENKKEKDDALKRAAYLYNGTDKLPDEVFHGNKQLETKIRLWYQQGERCLYSGKPIPIQELVHNSNNFEIDHILPLSLSFDDSLANKVLVYSWTNQEKGQKTPYQVIDSMDAAWSFREMKEYVLKQKGLGKKKRDYLLTTENIDKIEVKKKFIERNLVDTRYASRVVLNSLQSALRELGKDTKVSVVRGQFTSQLRRKWKIDKSRETYHHHAVDALIIAASSQLKLWEKQDNPMFVDYGNNQVVDKQTGEILSVSDNEYKELVFQPPYQGFVNTISSKGFEDEILFSYQVDSKYNRKVSDATIYSTRKAKIGKDKKEETYVLGKIKDIYSQNGFDTFVKKYNKDKTQFLMYQKDPLTWENVIEVILGDYPTTKKSEDGKNDVKCNPFEEYRRENGLICKYSKKGKGTPIKSLKYYDKKLGNCIDITPEESRNKVILQSINPWRADVYFNPETLKYELMGLKYSDLSFEKGTGNYHISQEKYDAIKEKEGIGKKSEFKFTLYRNDLILIKDIASGEQEIYRFLSRTMPNVNHYVELKPYDKEKFDNVQELVEALGEADKVGRCIKSLNKPNISIYKVRTDVLGNKYFVKKEGDKPKLDFKNNKK

SEQ ID NO: 241 - protein, 1367 aa, Streptococcus pyogenes
MDKKYSIGLDIGTNSVGWAVITDDYKVPSKKFKVLGNTDRHSIKKNLIGALLFGSGETAEATRLKRTARRRYTRRKNRICYLQEIFSNEMAKVDDSFFHRLEESFLVEEDKKHERHPIFGNIVDEVAYHEKYPTIYHLRKKLADSTDKADLRLIYLALAHMIKFRGHFLIEGDLNPDNSDVDKLFIQLVQIYNQLFEENPINASRVDAKAILSARLSKSRRLENLIAQLPGEKRNGLFGNLIALSLGLTPNFKSNFDLAEDAKLQLSKDTYDDDLDNLLAQIGDQYADLFLAAKNLSDAILLSDILRVNSEITKAPLSASMIKRYDEHHQDLTLLKALVRQQLPEKYKEIFFDQSKNGYAGYIDGGASQEEFYKFIKPILEKMDGTEELLVKLNREDLLRKQRTFDNGSIPHQIHLGELHAILRRQEDFYPFLKDNREKIEKILTFRIPYYVGPLARGNSRFAWMTRKSEETITPWNFEEVVDKGASAQSFIERMTNFDKNLPNEKVLPKHSLLYEYFTVYNELTKVKYVTEGMRKPAFLSGEQKKAIVDLLFKTNRKVTVKQLKEDYFKKIECFDSVEISGVEDRFNASLGAYHDLLKIIKDKDFLDNEENEDILEDIVLTLTLFEDRGMIEERLKTYAHLFDDKVMKQLKRRRYTGWGRLSRKLINGIRDKQSGKTILDFLKSDGFANRNFMQLIHDDSLTFKEDIQKAQVSGQGHSLHEQIANLAGSPAIKKGILQTVKIVDELVKVMGHKPENIVIEMARENQTTQKGQKNSRERMKRIEEGIKELGSQILKEHPVENTQLQNEKLYLYYLQNGRDMYVDQELDINRLSDYDVDHIVPQSFIKDDSIDNKVLTRSDKNRGKSDNVPSEEVVKKMKNYWRQLLNAKLITQRKFDNLTKAERGGLSELDKAGFIKRQLVETRQITKHVAQILDSRMNTKYDENDKLIREVKVITLKSKLVSDFRKDFQFYKVREINNYHHAHDAYLNAVVGTALIKKYPKLESEFVYGDYKVYDVRKMIAKSEQEIGKATAKYFFYSNIMNFFKTEITLANGEIRKRPLIETNGETGEIVWDKGRDFATVRKVLSMPQVNIVKKTEVQTGGFSKESILPKRNSDKLIARKKDWDPKKYGGFDSPTVAYSVLVVAKVEKGKSKKLKSVKELLGITIMERSSFEKNPIDFLEAKGYKEVKKDLIIKLPKYSLFELENGRKRMLASAGELQKGNELALPSKYVNFLYLASHYEKLKGSPEDNEQKQLFVEQHKHYLDEIIEQISEFSKRVILADANLDKVLSAYNKHRDKPIREQAENIIHLFTLTNLGAPAAFKYFDTTIDRKRYTSTKEVLDATLIHQSITGLYETRIDLSQLGGD

SEQ ID NO: 242 - protein, 1233 aa, Mycoplasma canis
MEKKRKVTLGFDLGIASVGWAIVDSETNQVYKLGSRLFDAPDTNLERRTQRGTRRLLRRRKYRNQKFYNLVKRTEVFGLSSREAIENRFRELSIKYPNIIELKTKALSQEVCPDEIAWILHDYLKNRGYFYDEKETKEDFDQQTVESMPSYKLNEFYKKYGYFKGALSQPTESEMKDNKDLKEAFFFDFSNKEWLKEINYFFNVQKNILSETFIEEFKKIFSFTRDISKGPGSDNMPSPYGIFGEFGDNGQGGRYEHIWDKNIGKCSIFTNEQRAPKYLPSALIFNFLNELANIRLYSTDKKNIQPLWKLSSVDKLNILLNLFNLPISEKKKKLTSTNINDIVKKESIKSIMISVEDIDMIKDEWAGKEPNVYGVGLSGLNIEESAKENKFKFQDLKILNVLINLLDNVGIKFEFKDRNDIIKNLELLDNLYLFLIYQKESNNKDSSIDLFIAKNESLNIENLKLKLKEFLLGAGNEFENHNSKTHSLSKKAIDEILPKLLDNNEGWNLEAIKNYDEEIKSQIEDNSSLMAKQDKKYLNDNFLKDAILPPNVKVTFQQAILIFNKIIQKFSKDFEIDKVVIELAREMTQDQENDALKGIAKAQKSKKSLVEERLEANNIDKSVFNDKYEKLIYKIFLWISQDFKDPYTGAQISVNEIVNNKVEIDHIIPYSLCFDDSSANKVLVHKQSNQEKSNSLPYEYIKQGHSGWNWDEFTKYVKRVFVNNVDSILSKKERLKKSENLLTASYDGYDKLGFLARNLNDTRYATILFRDQLNNYAEHHLIDNKKMFKVIAMNGAVTSFIRKNMSYDNKLRLKDRSDFSHHAYDAAIIALFSNKTKTLYNLIDPSLNGIISKRSEGYWVIEDRYTGEIKELKKEDWTSIKNNVQARKIAKEIEEYLIDLDDEVFFSRKTKRKTNRQLYNETIYGIATKTDEDGITNYYKKEKFSILDDKDIYLRLLREREKFVINQSNPEVIDQIIEIIESYGKENNIPSRDEAINIKYTKNKINYNLYLKQYMRSLTKSLDQFSEEFINQMIANKTFVLYNPTKNTTRKIKFLRLVNDVKINDIRKNQVINKFNGKNNEPKAFYENINSLGAIVFKNSANNFKTLSINTQIAIFGDKNWDIEDFKTYNMEKIEKYKEIYGIDKTYNFHSFIFPGTILLDKQNKEFYYISSIQTVRDIIEIKFLNKIEFKDENKNQDTSKTPKRLMFGIKSIMNNYEQVDISPFGINKKIFE

SEQ ID NO: 243 - protein, 1375 aa, Lactobacillus johnsonii
MTKIKDDYIVGLDIGTDSCGWVAMNSNNDILKLQGKTAIGSRLFEGGKSAAERRLFRTTHRRIKRRRWRLKLLEEFFDPYMAEVDPYFFARLKESGLSPLDKRKTVSSIVFPTSAEDKKFYDDYPTIYHLRYKLMTEDEKFDLREVYLAIHHIIKYRGNFLYNTSVKDFKASKIDVKSSIEKLNELYENLGLDLNVEFNISNTAEIEKVLKDKQIFKRDKVKKIAELFAIKTDNKEQSKRIKDISKQVANAVLGYKTRFDTIALKEISKDELSDWNFKLSDIDADSKFEALMGNLDENEQAILLTIKELFNEVTLNGIVEDGNTLSESMINKYNDHRDDLKLLKEVIENHIDRKKAKELALAYDLYVNNRHGQLLQAKKKLGKIKPRSKEDFYKVVNKNLDDSRASKEIKKKIELDSFMPKQRTNANGVIPYQLQQLELDKIIENQSKYYPFLKEINPVSSHLKEAPYKLDELIRFRVPYYVGPLISPNESTKDIQTKKNQNFAWMIRKEEGRITPWNFDQKVDRIESANKFIKRMTTKDTYLFGEDVLPANSLLYQKFTVLNELNNIRINGKRISVDLKQEIYENLFKKHTTVTVKKLENYLKENHNLVKVEIKGLADEKKFNSGLTTYNRFKNLNIFDNQIDDLKYRNDFEKIIEWSTIFEDKSIYKEKLRSIDWLNEKQINALSNIRLQGWGRLSKKLLAQLHDHNGQTIIEQLWDSQNNFMQIVTQADFKDAIAKANQNLLVATSVEDILNNAYTSPANKKAIRQVIKVVDDIVKAASGKVPKQIAIEFTRDADENPKRSQTRGSKLQKVYKDLSTELASKTIAEELNEAIKDKKLVQDKYYLYFMQLGRDAYTGEPINIDEIQKYDIDHILPQSFIKDDALDNRVLVSRAVNNGKSDNVPVKLFGNEMAANLGMTIRKMWEEWKNIGLISKTKYNNLLTDPDHINKYKSAGFIRRQLVETSQIIKLVSTILQSRYPNTEIITVKAKYNHYLREKFDLYKSREVNDYHHAIDAYLSAICGNLLYQNYPNLRPFFVYGQYKKFSSDPDKEKAIFNKTRKFSFISQLLKNKSENSKEIAKKLKRAYQFKYMLVSRETETRDQEMFKMTVYPRFSHDTVKAPRNLIPKKMGMSPDIYGGYTNNSDAYMVIVRIDKKKGTEYKILGIPTRELVNLKKAEKEDHYKSYLKEILTPRILYNKNGKRDKKITSFEIVKSKIPYKQVIQDGDKKFMLGSSTYVYNAKQLTLSTESMKAITNNFDKDSDENDALIKAYDEILDKVDKYLPLFDINKFREKLHSGREKFIKLSLEDKKDTILKVLEGLHDNAVMTKIPTIGLSTPLGFMQFPNGVILSENAKLIYQSPTGLFKKSVKISDL

SEQ ID NO: 244 - protein, 1053 aa, Staphylococcus aureus
MKRNYILGLDIGITSVGYGIIDYETRDVIDAGVRLFKEANVENNEGRRSKRGARRLKRRRRHRIQRVKKLLFDYNLLTDHSELSGINPYEARVKGLSQKLSEEEFSAALLHLAKRRGVHNVNEVEEDTGNELSTKEQISRNSKALEEKYVAELQLERLKKDGEVRGSINRFKTSDYVKEAKQLLKVQKAYHQLDQSFIDTYIDLLETRRTYYEGPGEGSPFGWKDIKEWYEMLMGHCTYFPEELRSVKYAYNADLYNALNDLNNLVITRDENEKLEYYEKFQIIENVFKQKKKPTLKQIAKEILVNEEDIKGYRVTSTGKPEFTNLKVYHDIKDITARKEIIENAELLDQIAKILTIYQSSEDIQEELTNLNSELTQEEIEQISNLKGYTGTHNLSLKAINLILDELWHTNDNQIAIFNRLKLVPKKVDLSQQKEIPTTLVDDFILSPVVKRSFIQSIKVINAIIKKYGLPNDIIIELAREKNSKDAQKMINEMQKRNRQTNERIEEIIRTTGKENAKYLIEKIKLHDMQEGKCLYSLEAIPLEDLLNNPFNYEVDHIIPRSVSFDNSFNNKVLVKQEENSKKGNRTPFQYLSSSDSKISYETFKKHILNLAKGKGRISKTKKEYLLEERDINRFSVQKDFINRNLVDTRYATRGLMNLLRSYFRVNNLDVKVKSINGGFTSFLRRKWKFKKERNKGYKHHAEDALIIANADFIFKEWKKLDKAKKVMENQMFEEKQAESMPEIETEQEYKEIFITPHQIKHIKDFKDYKYSHRVDKKPNRELINDTLYSTRKDDKGNTLIVNNLNGLYDKDNDKLKKLINKSPEKLLMYHHDPQTYQKLKLIMEQYGDEKNPLYKYYEETGNYLTKYSKKDNGPVIKKIKYYGNKLNAHLDITDDYPNSRNKVVKLSLKPYRFDVYLDNGVYKFVTVKNLDVIKKENYYEVNSKCYEEAKKLKKISNQAEFIASFYNNDLIKINGELYRVIGVNNDLLNRIEVNMIDITYREYLENMNDKRPPRIIKTIASKTQSIKKYSTDILGNLYEVKSKKHPQIIKKG

SEQ ID NO: 245 - protein, 1063 aa, Simonsiella muelleri
MEKFHYVLGLDLGIASVGWAAIEIDKETETSIGLLDCGVRTFERAEVPKTGDSLAKARREARSTRRLIRRRSHRLLRLKRLLKREIFRQPETFKDLPINAWQLRVKGLDSRLNEYEWAAVLLHLVKHRGYLSQRKSEMSETDSKSEMGRLLAGVAENHQLLQQEQYRTPAELALKKFVKHFRNKGGDYAHTFNRLDLQAELHLLFQKQRELGNPFTSPELERQVDDLLMTQRSALQGDAILKMLGHCGFEPEQFKAAKNTFSAERFIWLTKLNNLRIQDQGKERALTADERTKLLDEPYKKSKLTYAQVRKLLSLPQTAIFKGLRYDLEHDKKAENSTLMEMKSYHNIRQTLEKSGLKTEWQSIATQPEILDAIGTAFSIYKTDEDISHELKTCRLPENVLNELLKNINFDGFIQLSLTALRKILPLMEQGYRYDEACTQIYGNHHSGSLQQESKQFLPHIPIDDVRNPVVFRTLTQARKVVNAIIRRYGSPARVHIEMARELGKSKSDRDRIEKQQQKNKKERENAVAKFKEDFPDFVGEPRGKDILKMRLYEQQHGKCLYSGHDIDINRLNEKGYVEIDHALPFSRTWDDSQNNKVLVLGSENQNKRNQTPDEYLDGANNSQRWLEFQARVQTCHFSYGKKQRIQLAKLDDETEKGFLERNLNDTRYIARFMCQFVQENLYLTGKGKRLVFASNGGMTATLRNLWGLRKVREDNDRHHALDAIVVACSTASMQQKITKAFQRHESIEYVDTETGEVKFRIPQPWDFFRQEVMIRVFSDQPCEDLVEKLSARPEALHDNVTPLFVSRAPNRKMSGQGHLETIKSAKRLSEENSMVKKPLTTLKLKDIPEIVGYPSREPQLYAALKTRLETHDDDPIKAFAKPFYKPNKNGELGALVRSVRVKGVQNTGVMVHDGKGIADNATMVRVDVYTKAGKNYLVPVYVWQVAQGILPNRAVTSGKSEADWDLIDESFEFKFSLSRGDLVEMISNKGRIFGYYNGLDRANGSIGIREHDLEKSKGKDGVHRVGVKTATAFNKYHVDPLGKEIHRCSSEPRPTLKIKSKK

SEQ ID NO: 246 - protein, 1509 aa, Psychroflexus torquis
MKRILGLDLGTNSIGWSLIEHDFKNKQGQIEGLGVRIIPMSQEILGKFDAGQSISQTADRTKYRGVRRLYQRDNLRRERLHRVLKILDFLPKHYSESIDFQDKVGQFKPKQEVKLNYRKNEKNKHEFVFMNSFIEMVSEFKNAQPELFYNKGNGEETKIPYDWTLYYLRKKALTQQITKEELAWLILNFNQKRGYYQLRGEDIDEDKNKKYMQLKVNNLIDSGAKVKGKVLYNVIFDNGWKYEKQIVNKDEWEGRTKEFIITTKTLKNGNIKRTYKAVDSEIDWAAIKAKTEQDINKANKTVGEYIYESLLDNPSQKIRGKLVKTIERKFYKEEFEKLLSKQIELQPELFNESLYKACIKELYPRNENHQSNNKKQGFEYLFTEDIIFYQRPLKSQKSNISGCQFEHKIYKQKNKKTGKLELIKEPIKTISRSHPLFQEFRIWQWLQNLKIYNKEKIENGKLEDVTTQLLPNNEAYVTLFDFLNTKKELEQKQFIEYFVKKKLIDKKEKEHFRWNFVEDKKYPFSETRAQFLSRLAKVKGIKNTEDFLNKNTQVGSKENSPFIKRIEQLWHIIYSVSDLKEYEKALEKFAEKHNLEKDSFLKNFKKFPPFVSDYASYSKKAISKLLPIMRMGKYWSESAVPTQVKERSLSIMERVKVLPLKEGYSDKDLADLLSRVSDDDIPKQLIKSFISFKDKNPLKGLNTYQANYLVYGRHSETGDIQHWKTPEDIDRYLNNFKQHSLRNPIVEQVVMETLRVVRDIWEHYGNNEKDFFKEIHVELGREMKSPAGKREKLSQRNTENENTNHRIREVLKELMNDASVEGGVRDYSPSQQEILKLYEEGIYQNPNTNYLKVDEDEILKIRKKNNPTQKEIQRYKLWLEQGYISPYTGKIIPLTKLFTHEYQIEHIIPQSRYYDNSLGNKIICESEVNEDKDNKTAYEYLKVEKGSIVFGHKLLNLDEYEAHVNKYFKKNKTKLKNLLSEDIPEGFINRQLNDSRYISKLVKGLLSNIVRENGEQEATSKNLIPVTGVVTSKLKQDWGLNDKWNEIIAPRFKRLNKLTNSNDFGFWDNDINAFRIQVPDSLIKGFSKKRIDHRHHALDALVVACTSRNHTHYLSALNAENKNYSLRDKLVIKNENGDYTKTFQIPWQGFTIEAKNNLEKTVVSFKKNLRVINKTNNKFWSYKDENGNLNLGKDGKPKKKLRKQTKGYNWAIRKPLHKETVSGIYNINAPKNKIATSVRTLLTEIKNEKHLAKITDLRIRETILPNHLKHYLNNKGEANFSEAFSQGGIEDLNKKITTLNEGKKHQPIYRVKIFEVGSKFSISEDENSAKSKKYVEAAKGTNLFFAIYLDEENKKRNYETIPLNEVITHQKQVAGFPKSERLSVQPDSQKGTFLFTLSPNDLVYVPNNEELENRDLFNLGNLNVEQISRIYKFTDSSDKTCNFIPFQVSKLIFNLKKKEQKKLDVDFIIQNEFGLGSPQSKNQKSIDDVMIKEKCIKLKIDRLGNISKA

SEQ ID NO: 247 - protein, 1112 aa, Staphylococcus simulans
MLVGLKFKQSILFENMENAEDIKESATGSDAISLSDDYYENLSEFLTDEQLNFIESANTFFMGIMLDRILKGATSISAAKVRDYKIFKSQLKLIKDIVYQNKYDKYHEFFVTSKEDMRAYQENPDAKNFGKLSKFDQYLIHSKDQYAKLMKDLKGLVPKEYTEVLNLIDEQKFLVVQNTTDNASIPYQNNVFEAENILRNQQKYYPEITEEMIGKVINLISFRIPYYVGPLTNKNGQSDFAWMIRKSDEQTLPWNFDKVIDKSKSAEKFIRRMTSKCTYLLEEDVLPKHSLLYQEMEVLNELNNVQLRGENEPKHRIHRLDPKVKQFIYHNLFQKKKNVTHKDLITLLQNSEHRNTLNKTSGQKLKVFGTQNDSKFASKLSTYNDMKAILGSVENKRQMIEELVLWITIFEDKAILKQKIGEKYPNITEKQLNQIVKLNYSGWGRLSEKLLTKEVNGRSLIDLMYSTENNFMEIITDKTLGFDCFIKNSNKVKNAKISYKDVAELRTSPALKKGIWNAIKMVREISNLFGAPEKIIIEFATEDQAKGKRQKSRSELWDDLVKKNNLKRNKEFEGLFEELKAYPDLDFSNPKLWLYIHQNGKCMYTKKPIDLERLMSDTNNQLYEIDHILPRTFVKDDSINNKVLVIQSANQKKSGDKMPLEIFDNHVLVPFWKMLYENDLISSSKLSKLMKKEFNDLDKEGFIQRQLVETRQIISHVSDFLTEEYPSTTVVPMKANVVSELRRKFDIPKIRQLNDWHHAVDAYLNGFVYQAARVFYPKVNLFEFNFKWEKVREKWRQLGEFTENNKKREFFLFKRMENYVNEYGEGMISKLIFDLDNFKFNYSRKVESTESAFYKQSAFSPKNTTAQYDSDKNKTAIYKEMKNKRGIVVSYTYVKKDQELIGYGVFNETVFEYVNNADVDMNTRALKIVRKAFPKLDIKKAQYLFSINKGDALLVNGHPFLFVSAYERINGKQLEFDIAMQRKIKQALSPYNNMTEQEKVEFYNQFAEKVIEEFRNSIGLQSRDRKVNLIKNLFNNTEKSNDSMTQSILEVLKMTKVSAERSKELKIRWNGQTPNTFIDTKNNAEIQYKSITGLKTTKPKSIFKLAESKNEL

SEQ ID NO: 248 - protein, 1274 aa, Mycoplasma gallisept
MNINMNNSIKSKPEVTIGLDLGVGSVGWAIVDNETNIIHHLGSRLFSQAKTAEDRRSFRGVRRLIRRRKYKLKRFVNLIWKYNSYFGFKNKEDILNNYQEQQKLHNTVLNLKLEALNAKIDPKALSWILHDYLKNRGHFYEDNRDFNVYPTEELANYFDEFGYYKGIIDSKNDDDDKLEEGLTKYKFSNQHWLEEVKKVLSNQTGLPEKFKEEYESLFSYVRNYSEGPGSINSVSPYGIYHLDEKEGKVVQKYNNIWDKTIGKCSIFPDEYRAPKNSPIAMIFNEINELSTIRSYSIYLTGWFINQEFKKAYLNKLLDLLIKTNSEKPIDARQFKKLREETIAESIGKETLKDVESEEKLEKDDHKWKLKGLKLNTNGKIQYNDLSSLAKFVHKLKQHLKLDFLLEDQYTPLDKINFLQSLYVYLGKHLRYSNRVDSANLKEFSDSSRLFERVLQEQKDGLFKLFEQTDKDDEKILTQTHSLSTKAMLLAITRMTNLDNDEDNQKNNDKGWNFEAIKNFDQKFIDITKTNNNLSLKQDKRYLDDQFINDAILSPGVKRILREATKVFNAILKQFSEEYDVTKVVIELARELSEEKELENTKNYKKLIKKNGDKISEGLKALGIAEDKIEEILKSPTKSYKVLLWLQQDHIDPYSQKEIAFDDILTKTEKTEIDHIIPYSISFDDSSSNKLLVLAESNQAKSNQTPYEFINSGKAEITWEVYEAYCHKFKNGDSSLLDSTQRSKKFAKMMKTDTSSKYDIGFLARNLNDTRYATIVFRDALKDYANNHLVEDKPMFKVVCINGGVTSFLRKNFDPKSWYAKKDRDKNIHHAVDASIISIFSNETKTLFNQLTKFADYKLFKNTDGSWKKIDPKTGVVSEVTDENWKQIRVRNQVSEIAKVIDKYIQDSNIERKARYSRKIENKTNISLFNDTVYSAKKVGYEDQIKRKNLKTLDIHESAEENKNSKVKKQFVYRKLVNVSLLNNDKLADLFAEKEDILMYRANPWVINLAEQIFNEYTENKKIKSQNVFEKYMLDLTKEFPEKFSEAFVKSMIRNKTAIIYNVEKDVVHRIKRLKILSSELKENKWSNVIIRSKNESGTKLSYQDTINSIALMIMRSIDPTAKKQYIRVPLNTLNLHLGDQDFDLHNIDAYLKKPKFVKYLKANEIGDEYKPWRVLTSGTLLIHKKDKKLMYISSFQNLNDLIEIKNLIETEYKENVDSDPKKKKKASQILRSLSVILNDYILLDAKYNFDILGLSKNKIDEILNSKLDLDKIAK

SEQ ID NO: 249 - protein, 1122 aa, Artificial Sequence; identical to SEQ ID NO: 18
  Synthetic sequence

SEQ ID NO: 250 - protein, 1236 aa, Artificial Sequence; identical to SEQ ID NO: 16
  Synthetic sequence

SEQ ID NO: 251 - protein, 1059 aa, Artificial Sequence; identical to SEQ ID NO: 10
  Synthetic sequence

SEQ ID NO: 252 - protein, 1166 aa, Artificial Sequence; identical to SEQ ID NO: 34
  Synthetic sequence

SEQ ID NO: 253 - protein, 1149 aa, Artificial Sequence; identical to SEQ ID NO: 32
  Synthetic sequence

SEQ ID NO: 254 - protein, 1314 aa, Artificial Sequence; identical to SEQ ID NO: 22
  Synthetic sequence

SEQ ID NO: 255 - protein, 1064 aa, Artificial Sequence; identical to SEQ ID NO: 33
  Synthetic sequence

SEQ ID NO: 256 - protein, 1401 aa, Artificial Sequence
  Synthetic sequence
MDKKYSIGLDIGTNSVGWAVITDEYKVPSKKFKVLGNTDRHSIKKNLIGALLFDSGETAEATRLKRTARRRYTRRKNRICYLQEIFSNEMAKVDDSFFHRLEESFLVEEDKKHERHPIFGNIVDEVAYHEKYPTIYHLRKKLVDSTDKADLRLIYLALAHMIKFRGHFLIEGDLNPDNSDVDKLFIQLVQTYNQLFEENPINASGVDAKAILSARLSKSRRLENLIAQLPGEKKNGLFGNLIALSLGLTPNFKSNFDLAEDAKLQLSKDTYDDDLDNLLAQIGDQYADLFLAAKNLSDAILLSDILRVNTEITKAPLSASMIKRYDEHHQDLTLLKALVRQQLPEKYKEIFFDQSKNGYAGYIDGGASQEEFYKFIKPILEKMDGTEELLVKLNREDLLRKQRTFDNGSIPHQIHLGELHAILRRQEDFYPFLKDNREKIEKILTFRIPYYVGPLARGNSRFAWMTRKSEETITPWNFEEVVDKGASAQSFIERMTNFDKNLPNEKVLPKHSLLYEYFTVYNELTKVKYVTEGMRKPAFLSGEQKKAIVDLLFKTNRKVTVKQLKEDYFKKIECFDSVEISGVEDRFNASLGTYHDLLKIIKDKDFLDNEENEDILEDIVLTLTLFEDREMIEERLKTYAHLFDDKVMKQLKRRRYTGWGRLSRKLINGIRDKQSGKTILDFLKSDGFANRNFMQLIHDDSLTFKEDIQKAQVSGQGDSLHEHIANLAGSPAIKKGILQTVKVVDELVKVMGRHKPENIVIEMARENQTTQKGQKNSRERMKRIEEGIKELGSQILKEHPVENTQLQNEKLYLYYLQNGRDMYVDQELDINRLSDYDVDHIVPQSFLKDDSIDNKVLTRSDKNRGKSDNVPSEEVVKKMKNYWRQLLNAKLITQRKFDNLTKAERGGLSELDKAGFIKRQLVETRQITKHVAQILDSRMNTKYDENDKLIREVKVITLKSKLVSDFRKDFQFYKVREINNYHHAHDAYLNAVVGTALIKKYPKLESEFVYGDYKVYDVRKMIAKSEQEIGKATAKYFFYSNIMNFFKTEITLANGEIRKRPLIETNGETGEIVWDKGRDFATVRKVLSMPQVNIVKKTEVQTGGFSKESILPKRNSDKLIARKKDWDPKKYGGFDSPTVAYSVLVVAKVEKGKSKKLKSVKELLGITIMERSSFEKNPIDFLEAKGYKEVKKDLIIKLPKYSLFELENGRKRMLASAGELQKGNELALPSKYVNFLYLASHYEKLKGSPEDNEQKQLFVEQHKHYLDEIIEQISEFSKRVILADANLDKVLSAYNKHRDKPIREQAENIIHLFTLTNLGAPAAFKYFDTTIDRKRYTSTKEVLDATLIHQSITGLYETRIDLSQLGGDAYPYDVPDYASLGSGSPKKKRKVEDPKKKRKVD

SEQ ID NO: 257 - protein, 1368 aa, Artificial Sequence
  Synthetic sequence
MDKKYSIGLAIGTNSVGWAVITDDYKVPSKKLKGLGNTDRHGIKKNLIGALLFDSGETAEATRLKRTARRRYTRRKNRICYLQEIFSNEMAKVDDSFFHRLEESFLVEEDKKHERHPIFGNIVDEVAYHEKYPTIYHLRKKLADSTDKVDLRLIYLALAHMIKFRGHFLIEGDLNPDNSDVDKLFIQLVQTYNQLFEENPINASRVDAKAILSARLSKSRRLENLIAQLPGEKKNGLFGNLIALSLGLTPNFKSNFDLAEDAKLQLSKDTYDDDLDNLLAQIGDQYADLFLAAKNLSDATLLSDILRVNSEITKAPLSASMIKRYDEHHQDLTLLKALVRQQLPEKYKEIFFDQSKNGYAGYIDGGASQEEFYKFIKPILEKMDGTEELLAKLNREDLLRKQRTFDNGSIPYQIHLGELHAILRRQEDFYPFLKDNREKIEKILTFRIPYYVGPLARGNSRFAWMTRKSEETITPWNFEEVVDKGASAQSFIERMTNFDKNLPNEKVLPKHSLLYEYFTVYNELTKVKYVTEGMRKPAFLSGEQKKAIVDLLFKTNRKVTVKQLKEDYFKKIECFDSVEISGVEDRFNASLGTYHDLLKIIKDKDFLDNEENEDILEDIVLTLTLFEDREMIEERLKTYAHLFDDKVMKQLKRRRYTGWGRLSRKLINGIRDKQSGKTILDFLKSDGFANRNFMQLIHDDSLTFKEDIQKAQVSGQGDSLHEHIANLAGSPAIKKGILQTVKVVDELVKVMGRHKPENIVIEMARENQTTQKGQKNSRERMKRIEEGIKELGSDILKEYPVENTQLQNEKLYLYYLQNGRDMYVDQELDINRLSDYDVDHIVPQSFLKDDSIDNKVLTRSDKNRGKSDNVPSEEVVKKMKNYWRQLLNAKLITQRKFDNLTKAERGGLSELDKVGFIKRQLVETRQITKHVAQILDSRMNTKYDENDKLIREVRVITLKSKLVSDFRKDFQFYKVREINNYHHAHDAYLNAVVGTALIKKYPKLESEFVYGDYKVYDVRKMIAKSEQEIGKATAKYFFYSNIMNFFKTEITLANGEIRKRPLIETNGETGEIVWDKGRDFATVRKVLSMPQVNIVKKTEVQTGGFSKESILPKRNSDKLIARKKDWDPKKYGGFDSPTVAYSVLVVAKVEKGKSKKLKSVKELLGITIMERSSFEKDPIDFLEAKGYKEVRKDLIIKLPKYSLFELENGRKRMLASAGELQKGNELALPSKYVNFLYLASHYEKLKGSPEDNEQKQLFVEQHKHYLDEIIEQISEFSKRVILADANLDKVLSAYNKHRDKPIREQAENIIHLFTLTNLGAPAAFKYFDTTIDRKRYTSTKEVLDATLIHQSITGLYETRIDLSQLGGD

SEQ ID NO: 258 - protein, 1368 aa, Artificial Sequence
  Synthetic sequence
MDKKYSIGLDIGTNSVGWAVITDDYKVPSKKLKGLGNTDRHGIKKNLIGALLFDSGETAEATRLKRTARRRYTRRKNRICYLQEIFSNEMAKVDDSFFHRLEESFLVEEDKKHERHPIFGNIVDEVAYHEKYPTIYHLRKKLADSTDKVDLRLIYLALAHMIKFRGHFLIEGDLNPDNSDVDKLFIQLVQTYNQLFEENPINASRVDAKAILSARLSKSRRLENLIAQLPGEKKNGLFGNLIALSLGLTPNFKSNFDLAEDAKLQLSKDTYDDDLDNLLAQIGDQYADLFLAAKNLSDATLLSDILRVNSEITKAPLSASMIKRYDEHHQDLTLLKALVRQQLPEKYKEIFFDQSKNGYAGYIDGGASQEEFYKFIKPILEKMDGTEELLAKLNREDLLRKQRTFDNGSIPYQIHLGELHAILRRQEDFYPFLKDNREKIEKILTFRIPYYVGPLARGNSRFAWMTRKSEETITPWNFEEVVDKGASAQSFIERMTNFDKNLPNEKVLPKHSLLYEYFTVYNELTKVKYVTEGMRKPAFLSGEQKKAIVDLLFKTNRKVTVKQLKEDYFKKIECFDSVEISGVEDRFNASLGTYHDLLKIIKDKDFLDNEENEDILEDIVLTLTLFEDREMIEERLKTYAHLFDDKVMKQLKRRRYTGWGRLSRKLINGIRDKQSGKTILDFLKSDGFANRNFMQLIHDDSLTFKEDIQKAQVSGQGDSLHEHIANLAGSPAIKKGILQTVKVVDELVKVMGRHKPENIVIEMARENQTTQKGQKNSRERMKRIEEGIKELGSDILKEYPVENTQLQNEKLYLYYLQNGRDMYVDQELDINRLSDYDVDAIVPQSFLKDDSIDNKVLTRSDKNRGKSDNVPSEEVVKKMKNYWRQLLNAKLITQRKFDNLTKAERGGLSELDKVGFIKRQLVETRQITKHVAQILDSRMNTKYDENDKLIREVRVITLKSKLVSDFRKDFQFYKVREINNYHHAHDAYLNAVVGTALIKKYPKLESEFVYGDYKVYDVRKMIAKSEQEIGKATAKYFFYSNIMNFFKTEITLANGEIRKRPLIETNGETGEIVWDKGRDFATVRKVLSMPQVNIVKKTEVQTGGFSKESILPKRNSDKLIARKKDWDPKKYGGFDSPTVAYSVLVVAKVEKGKSKKLKSVKELLGITIMERSSFEKDPIDFLEAKGYKEVRKDLIIKLPKYSLFELENGRKRMLASAGELQKGNELALPSKYVNFLYLASHYEKLKGSPEDNEQKQLFVEQHKHYLDEIIEQISEFSKRVILADANLDKVLSAYNKHRDKPIREQAENIIHLFTLTNLGAPAAFKYFDTTIDRKRYTSTKEVLDATLIHQSITGLYETRIDLSQLGGD

SEQ ID NO: 259 - protein, 1368 aa, Artificial Sequence
  Synthetic sequence
MDKKYSIGLAIGTNSVGWAVITDDYKVPSKKLKGLGNTDRHGIKKNLIGALLFDSGETAEATRLKRTARRRYTRRKNRICYLQEIFSNEMAKVDDSFFHRLEESFLVEEDKKHERHPIFGNIVDEVAYHEKYPTIYHLRKKLADSTDKVDLRLIYLALAHMIKFRGHFLIEGDLNPDNSDVDKLFIQLVQTYNQLFEENPINASRVDAKAILSARLSKSRRLENLIAQLPGEKKNGLFGNLIALSLGLTPNFKSNFDLAEDAKLQLSKDTYDDDLDNLLAQIGDQYADLFLAAKNLSDATLLSDILRVNSEITKAPLSASMIKRYDEHHQDLTLLKALVRQQLPEKYKEIFFDQSKNGYAGYIDGGASQEEFYKFIKPILEKMDGTEELLAKLNREDLLRKQRTFDNGSIPYQIHLGELHAILRRQEDFYPFLKDNREKIEKILTFRIPYYVGPLARGNSRFAWMTRKSEETITPWNFEEVVDKGASAQSFIERMTNFDKNLPNEKVLPKHSLLYEYFTVYNELTKVKYVTEGMRKPAFLSGEQKKAIVDLLFKTNRKVTVKQLKEDYFKKIECFDSVEISGVEDRFNASLGTYHDLLKIIKDKDFLDNEENEDILEDIVLTLTLFEDREMIEERLKTYAHLFDDKVMKQLKRRRYTGWGRLSRKLINGIRDKQSGKTILDFLKSDGFANRNFMQLIHDDSLTFKEDIQKAQVSGQGDSLHEHIANLAGSPAIKKGILQTVKVVDELVKVMGRHKPENIVIEMARENQTTQKGQKNSRERMKRIEEGIKELGSDILKEYPVENTQLQNEKLYLYYLQNGRDMYVDQELDINRLSDYDVDAIVPQSFLKDDSIDNKVLTRSDKNRGKSDNVPSEEVVKKMKNYWRQLLNAKLITQRKFDNLTKAERGGLSELDKVGFIKRQLVETRQITKHVAQILDSRMNTKYDENDKLIREVRVITLKSKLVSDFRKDFQFYKVREINNYHHAHDAYLNAVVGTALIKKYPKLESEFVYGDYKVYDVRKMIAKSEQEIGKATAKYFFYSNIMNFFKTEITLANGEIRKRPLIETNGETGEIVWDKGRDFATVRKVLSMPQVNIVKKTEVQTGGFSKESILPKRNSDKLIARKKDWDPKKYGGFDSPTVAYSVLVVAKVEKGKSKKLKSVKELLGITIMERSSFEKDPIDFLEAKGYKEVRKDLIIKLPKYSLFELENGRKRMLASAGELQKGNELALPSKYVNFLYLASHYEKLKGSPEDNEQKQLFVEQHKHYLDEIIEQISEFSKRVILADANLDKVLSAYNKHRDKPIREQAENIIHLFTLTNLGAPAAFKYFDTTIDRKRYTSTKEVLDATLIHQSITGLYETRIDLSQLGGD

SEQ ID NO: 260 - protein, 15 aa, Artificial Sequence
  Synthetic sequence
IGLDIGTNSVGWAVI

SEQ ID NO: 261 - protein, 8 aa, Artificial Sequence
  Synthetic sequence
IVIEMARE

SEQ ID NO: 262 - protein, 27 aa, Artificial Sequence
  Synthetic sequence
DVDHIVPQSFLKDDSIDNKVLTRSDKN

SEQ ID NO: 263 - protein, 8 aa, Artificial Sequence
  Synthetic sequence
HHAHDAYL

SEQ ID NO: 264 - protein, 11 aa, Artificial Sequence
  Synthetic sequence
YGRKKRRQRRR

SEQ ID NO: 265 - protein, 12 aa, Artificial Sequence
  Synthetic sequence
RRQRRTSKLMKR

SEQ ID NO: 266 - protein, 27 aa, Artificial Sequence
  Synthetic sequence
GWTLNSAGYLLGKINLKALAALAKKIL

SEQ ID NO: 267 - protein, 33 aa, Artificial Sequence
  Synthetic sequence
KALAWEAKLAKALAKALAKHLAKALAKALKCEA

SEQ ID NO: 268 - protein, 16 aa, Artificial Sequence
  Synthetic sequence
RQIKIWFQNRRMKWKK

SEQ ID NO: 269 - protein, 9 aa, Artificial Sequence
  Synthetic sequence
RKKRRQRRR

SEQ ID NO: 270 - protein, 8 aa, Artificial Sequence
  Synthetic sequence
RKKRRQRR

SEQ ID NO: 271 - protein, 11 aa, Artificial Sequence
  Synthetic sequence
YARAAARQARA

SEQ ID NO: 272 - protein, 11 aa, Artificial Sequence
  Synthetic sequence
THRLPRRRRRR

SEQ ID NO: 273 - protein, 11 aa, Artificial Sequence
  Synthetic sequence
GGRRARRRRRR

SEQ ID NO: 274 - protein, 13 aa, Artificial Sequence
  Synthetic sequence
DAYPYDVPDYASL

SEQ ID NO: 275 - protein, 17 aa, Artificial Sequence
  Synthetic sequence
PKKKRKVEDPKKKRKVD

SEQ ID NO: 276 - DNA, 4206 bp, Artificial Sequence
  Synthetic sequence
atggacaagaagtacagcatcggcctggacatcggcaccaactctgtgggctgggccgtgatcaccgacgagtacaaggtgcccagcaagaaattcaaggtgctgggcaacaccgaccggcacagcatcaagaagaacctgatcggcgccctgctgttcgacagcggagaaacagccgaggccacccggctgaagagaaccgccagaagaagatacaccagacggaagaaccggatctgctatctgcaagagatcttcagcaacgagatggccaaggtggacgacagcttcttccacagactggaagagtccttcctggtggaagaggataagaagcacgagcggcaccccatcttcggcaacatcgtggacgaggtggcctaccacgagaagtaccccaccatctaccacctgagaaagaaactggtggacagcaccgacaaggccgacctgcggctgatctatctggccctggcccacatgatcaagttccggggccacttcctgatcgagggcgacctgaaccccgacaacagcgacgtggacaagctgttcatccagctggtgcagacctacaaccagctgttcgaggaaaaccccatcaacgccagcggcgtggacgccaaggccatcctgtctgccagactgagcaagagcagacggctggaaaatctgatcgcccagctgcccggcgagaagaagaatggcctgttcggcaacctgattgccctgagcctgggcctgacccccaacttcaagagcaacttcgacctggccgaggatgccaaactgcagctgagcaaggacacctacgacgacgacctggacaacctgctggcccagatcggcgaccagtacgccgacctgtttctggccgccaagaacctgtccgacgccatcctgctgagcgacatcctgagagtgaacaccgagatcaccaaggcccccctgagcgcctctatgatcaagagatacgacgagcaccaccaggacctgaccctgctgaaagctctcgtgcggcagcagctgcctgagaagtacaaagagattttcttcgaccagagcaagaacggctacgccggctacatcgatggcggagccagccaggaagagttctacaagttcatcaagcccatcctggaaaagatggacggcaccgaggaactgctcgtgaagctgaacagagaggacctgctgcggaagcagcggaccttcgacaacggcagcatcccccaccagatccacctgggagagctgcacgccattctgcggcggcaggaagatttttacccattcctgaaggacaaccgggaaaagatcgagaagatcctgaccttccgcatcccctactacgtgggccctctggccaggggaaacagcagattcgcctggatgaccagaaagagcgaggaaaccatcaccccctggaacttcgaggaagtggtggacaagggcgccagcgcccagagcttcatcgagcggatgaccaacttcgataagaacctgcccaacgagaaggtgctgcccaagcacagcctgctgtacgagtacttcaccgtgtacaacgagctgaccaaagtgaaatacgtgaccgagggaatgagaaagcccgccttcctgagcggcgagcagaaaaaagccatcgtggacctgctgttcaagaccaaccggaaagtgaccgtgaagcagctgaaagaggactacttcaagaaaatcgagtgcttcgactccgtggaaatctccggcgtggaagatcggttcaacgcctccctgggcacataccacgatctgctgaaaattatcaaggacaaggacttcctggacaatgaggaaaacgaggacattctggaagatatcgtgctgaccctgacactgtttgaggacagagagatgatcgaggaacggctgaaaacctatgcccacctgttcgacgacaaagtgatgaagcagctgaagcggcggagatacaccggctggggcaggctgagccggaagctgatcaacggcatccgggacaagcagtccggcaagacaatcctggatttcctgaagtccgacggcttcgccaacagaaacttcatgcagctgatccacgacgacagcctgacctttaaagaggacatccagaaagcccaggtgtccggccagggcgatagcctgcacgagcacattgccaatctggccggcagccccgccattaagaagggcatcctgcagacagtgaaggtggtggacgagctcgtgaaagtgatgggccggcacaagcccgagaacatcgtgatcgaaatggccagagagaaccagaccacccagaagggacagaagaacagccgcgagagaatgaagcggatcgaagagggcatcaaagagctgggcagccagatcctgaaagaacaccccgtggaaaacacccagctgcagaacgagaagctgtacctgtactacctgcagaatgggcgggatatgtacgtggaccaggaactggacatcaaccggctgtccgactacgatgtggaccatatcgtgcctcagagctttctgaaggacgactccatcgataacaaagtgctgactcggagcgacaagaaccggggcaagagcgacaacgtgccctccgaagaggtcgtgaagaagatgaagaactactggcgccagctgctgaatgccaagctgattacccagaggaagttcgacaatctgaccaaggccgagagaggcggcctgagcgaactggataaggccggcttcatcaagagacagctggtggaaacccggcagatcacaaagcacgtggcacagatcctggactcccggatgaacactaagtacgacgagaacgacaaactgatccgggaagtgaaagtgatcaccctgaagtccaagctggtgtccgatttccggaaggatttccagttttacaaagtgcgcgagatcaacaactaccaccacgcccacgacgcctacctgaacgccgtcgtgggaaccgccctgatcaaaaagtaccctaagctggaaagcgagttcgtgtacggcgactacaaggtgtacgacgtgcggaagatgatcgccaagagcgagcaggaaatcggcaaggctaccgccaagtacttcttctacagcaacatcatgaactttttcaagaccgagattaccctggccaacggcgagatccggaagcggcctctgatcgagacaaacggcgaaacaggcgagatcgtgtgggataagggccgggactttgccaccgtgcggaaagtgctgtctatgccccaagtgaatatcgtgaaaaagaccgaggtgcagacaggcggcttcagcaaagagtctatcctgcccaagaggaacagcgacaagctgatcgccagaaagaaggactgggaccctaagaagtacggcggcttcgacagccccaccgtggcctattctgtgctggtggtggccaaagtggaaaagggcaagtccaagaaactgaagagtgtgaaagagctgctggggatcaccatcatggaaagaagcagcttcgagaagaatcccatcgactttctggaagccaagggctacaaagaagtgaaaaaggacctgatcatcaagctgcctaagtactccctgttcgagctggaaaacggccggaagagaatgctggcctctgccggcgaactgcagaagggaaacgaactggccctgccctccaaatatgtgaacttcctgtacctggccagccactatgagaagctgaagggctcccccgaggataatgagcagaaacagctgtttgtggaacagcacaaacactacctggacgagatcatcgagcagatcagcgagttctccaagagagtgatcctggccgacgctaatctggacaaggtgctgagcgcctacaacaagcacagagacaagcctatcagagagcaggccgagaatatcatccacctgtttaccctgaccaatctgggagcccctgccgccttcaagtactttgacaccaccatcgaccggaagaggtacaccagcaccaaagaggtgctggacgccaccctgatccaccagagcatcaccggcctgtacgagacacggatcgacctgtctcagctgggaggcgacgcctatccctatgacgtgcccgattatgccagcctgggcagcggctcccccaagaaaaaacgcaaggtggaagatcctaagaaaaagcggaaagtggactga

SEQ ID NO: 277 - protein, 1401 aa, Artificial Sequence; identical to SEQ ID NO: 256
  Synthetic sequence

SEQ ID NO: 278 - DNA, 50 bp, Artificial Sequence
  Synthetic sequence
ttatatgaacataactcaatttgtaaaaaagggtattggggaattcatta

SEQ ID NO: 279 - DNA, 50 bp, Artificial Sequence
  Synthetic sequence
taatgaattccccaatacccttttttacaaattgagttatgttcatataa

SEQ ID NO: 280 - RNA, 42 nt, Artificial Sequence
  Synthetic sequence
auaacucaauuuguaaaaaaguuuuagagcuaugcuguuuug

SEQ ID NO: 281 - DNA, 27 bp, Artificial Sequence
  Synthetic sequence
aacataactcaatttgtaaaaaagggt

SEQ ID NO: 282 - DNA, 27 bp, Artificial Sequence
  Synthetic sequence
acccttttttacaaattgagttatgtt

SEQ ID NO: 283 - RNA, 25 nt, Artificial Sequence
  Synthetic sequence
auaacucaauuuguaaaaaaguuuu

SEQ ID NO: 284 - DNA, 23 bp, Artificial Sequence
  Synthetic sequence
agcataactcaatttgtaaaaaa

SEQ ID NO: 285 - DNA, 23 bp, Artificial Sequence
  Synthetic sequence
aacataactcaatctgtaaaaaa

SEQ ID NO: 286 - DNA, 23 bp, Artificial Sequence
  Synthetic sequence
aacataactcaatttgaaaaaaa

SEQ ID NO: 287 - DNA, 23 bp, Artificial Sequence
  Synthetic sequence
aacataactcaatttgttaaaaa

SEQ ID NO: 288 - DNA, 23 bp, Artificial Sequence
  Synthetic sequence
aacataactcaatttgtataaaa

SEQ ID NO: 289 - DNA, 23 bp, Artificial Sequence
  Synthetic sequence
aacataactcaatttgtaataaa

SEQ ID NO: 290 - DNA, 23 bp, Artificial Sequence
  Synthetic sequence
aacataactcaatttgtaaataa

SEQ ID NO: 291 - DNA, 27 bp, Artificial Sequence
  Synthetic sequence
aacataactcaatttgtaaaaaatggc

SEQ ID NO: 292 - DNA, 27 bp, Artificial Sequence
  Synthetic sequence
gccattttttacaaattgagttatgtt

SEQ ID NO: 293 - DNA, 20 bp, Artificial Sequence
  Synthetic sequence
tattgagttaaagtaaaaaa

SEQ ID NO: 294 - DNA, 20 bp, Artificial Sequence
  Synthetic sequence
tattgagttattgtaaaaaa

SEQ ID NO: 295 - DNA, 20 bp, Artificial Sequence
  Synthetic sequence
tattgagtatttgtaaaaaa

SEQ ID NO: 296 - DNA, 20 bp, Artificial Sequence
  Synthetic sequence
tattgacaatttgtaaaaaa

SEQ ID NO: 297 - DNA, 20 bp, Artificial Sequence
  Synthetic sequence
tattctcaatttgtaaaaaa

SEQ ID NO: 298 - DNA, 20 bp, Artificial Sequence
  Synthetic sequence
taaactcaatttgtaaaaaa

SEQ ID NO: 299 - RNA, 62 nt, Artificial Sequence
  Synthetic sequence
aaaaauuaggugcgcuuggcguuuuagagcuagaaauagcaaguuaaaauaaggcuaguccg

SEQ ID NO: 300 - RNA, 54 nt, Artificial Sequence
  Synthetic sequence
aaaaauuaggugcgcuuggcguuuuagagcuagaaauagcaaguuaaaauaagg

SEQ ID NO: 301 - DNA, 50 bp, Artificial Sequence
  Synthetic sequence
tgcgctggttgatttcttcttgcgctttttgggtattggggaattcatta

SEQ ID NO: 302 - DNA, 50 bp, Artificial Sequence
  Synthetic sequence
taatgaattccccaatacccaaaaagcgcaagaagaaatcaaccagcgca

SEQ ID NO: 303 - RNA, 42 nt, Artificial Sequence
  Synthetic sequence
gauuucuucuugcgcuuuuuguuuuagagcuaugcuguuuug

SEQ ID NO: 304 - DNA, 50 bp, Artificial Sequence
  Synthetic sequence
ggttatattaagtgccgaggaaaaattaggtgcgcttggctggcgcatta

SEQ ID NO: 305 - DNA, 50 bp, Artificial Sequence
  Synthetic sequence
taatgcgccagccaagcgcacctaatttttcctcggcacttaatataacc

SEQ ID NO: 306 - RNA, 42 nt, Artificial Sequence
  Synthetic sequence
aaaaauuaggugcgcuuggcguuuuagagcuaugcuguuuug

SEQ ID NO: 307 - DNA, 50 bp, Artificial Sequence
  Synthetic sequence
tacgctggttgatttcttcttgcgcttttttggctttttcgagttcggct

SEQ ID NO: 308 - DNA, 50 bp, Artificial Sequence
  Synthetic sequence
agccgaactcgaaaaagccaaaaaagcgcaagaagaaatcaaccagcgta

SEQ ID NO: 309 - RNA, 42 nt, Artificial Sequence; identical to SEQ ID NO: 303
  Synthetic sequence

SEQ ID NO: 310 - DNA, 14 bp, Artificial Sequence
  Synthetic sequence
taatgcgccagcca

SEQ ID NO: 311 - RNA, 42 nt, Artificial Sequence; identical to SEQ ID NO: 306
  Synthetic sequence

SEQ ID NO: 312 - DNA, 25 bp, Artificial Sequence
  Synthetic sequence
ataactcaatttgtaaaaaagggta

SEQ ID NO: 313 - DNA, 25 bp, Artificial Sequence
  Synthetic sequence
ataactcaatttgtaaaaaagcgta

SEQ ID NO: 314 - DNA, 25 bp, Artificial Sequence
  Synthetic sequence
ataactcaatttgtaaaaaagccta

SEQ ID NO: 315 - DNA, 26 bp, Artificial Sequence
  Synthetic sequence
aaaaattaggtgcgcttggctggcgc

SEQ ID NO: 316 - DNA, 26 bp, Artificial Sequence
  Synthetic sequence
aaaaattaggtgcgcttggctcgcgc

SEQ ID NO: 317 - DNA, 26 bp, Artificial Sequence
  Synthetic sequence
aaaaattaggtgcgcttggctgccgc

SEQ ID NO: 318 - DNA, 26 bp, Artificial Sequence
  Synthetic sequence
aaaaattaggtgcgcttggctggccc

SEQ ID NO: 319 - DNA, 26 bp, Artificial Sequence
  Synthetic sequence
aaaaattaggtgcgcttggctccccc

SEQ ID NO: 320 - DNA, 21 bp, Artificial Sequence
  Synthetic sequence
aaaaattaggtgcgcttggct

SEQ ID NO: 321 - RNA, 62 nt, Artificial Sequence
  Synthetic sequence
gauuucuucuugcgcuuuuuguuuuagagcuagaaauagcaaguuaaaauaaggcuaguccg

SEQ ID NO: 322 - RNA, 54 nt, Artificial Sequence
  Synthetic sequence
gauuucuucuugcgcuuuuuguuuuagagcuagaaauagcaaguuaaaauaagg

SEQ ID NO: 323 - RNA, 62 nt, Artificial Sequence
  Synthetic sequence
auaacucaauuuguaaaaaaguuuuagagcuagaaauagcaaguuaaaauaaggcuaguccg

SEQ ID NO: 324 - RNA, 54 nt, Artificial Sequence
  Synthetic sequence
auaacucaauuuguaaaaaaguuuuagagcuagaaauagcaaguuaaaauaagg

SEQ ID NO: 325 - DNA, 120 bp, Artificial Sequence
  Synthetic sequence
gtcccaattcttgttgaattagatggtgatgttaatgggcacaaattttctgtcagtggagagggtgaaggtgatgcaacatacggaaaacttacccttaaatttatttgcactactgga

SEQ ID NO: 326 - DNA, 120 bp, Artificial Sequence
  Synthetic sequence
tccagtagtgcaaataaatttaagggtaagttttccgtatgttgcatcaccttcaccctctccactgacagaaaatttgtgcccattaacatcaccatctaattcaacaagaattgggac

SEQ ID NO: 327 - DNA, 26 bp, Artificial Sequence
  Synthetic sequence
ccaattcttgttgaattagatggtga

SEQ ID NO: 328 - DNA, 26 bp, Artificial Sequence
  Synthetic sequence
aattagatggtgatgttaatgggcac

SEQ ID NO: 329 - DNA, 26 bp, Artificial Sequence
  Synthetic sequence
aaattttctgtcagtggagagggtga

SEQ ID NO: 330 - DNA, 26 bp, Artificial Sequence
  Synthetic sequence
catctaattcaacaagaattgggaca

SEQ ID NO: 331 - DNA, 26 bp, Artificial Sequence
  Synthetic sequence
cagtagtgcaaataaatttaagggta

SEQ ID NO: 332 - RNA, 68 nt, Artificial Sequence
  Synthetic sequence
ccaauucuuguugaauuagauggugaguuuuagagcuagaaauagcaaguuaaaauaaggcuaguccg

SEQ ID NO: 333 - RNA, 68 nt, Artificial Sequence
  Synthetic sequence
aauuagauggugauguuaaugggcacguuuuagagcuagaaauagcaaguuaaaauaaggcuaguccg

SEQ ID NO: 334 - RNA, 68 nt, Artificial Sequence
  Synthetic sequence
aaauuuucugucaguggagagggugaguuuuagagcuagaaauagcaaguuaaaauaaggcuaguccg

SEQ ID NO: 335 - RNA, 68 nt, Artificial Sequence
  Synthetic sequence
caucuaauucaacaagaauugggacaguuuuagagcuagaaauagcaaguuaaaauaaggcuaguccg

SEQ ID NO: 336 - RNA, 68 nt, Artificial Sequence
  Synthetic sequence
caguagugcaaauaaauuuaaggguaguuuuagagcuagaaauagcaaguuaaaauaaggcuaguccg

SEQ ID NO: 337 - DNA, 50 bp, Artificial Sequence
  Synthetic sequence
ggttatattaagtgccgaggaaaaattaggtgcgcttggctgccgcatta

SEQ ID NO: 338 - DNA, 50 bp, Artificial Sequence
  Synthetic sequence
taatgcggcagccaagcgcacctaatttttcctcggcacttaatataacc

SEQ ID NO: 339 - RNA, 42 nt, Artificial Sequence; identical to SEQ ID NO: 306
  Synthetic sequence

SEQ ID NO: 340 - DNA, 59 bp, Artificial Sequence
  Synthetic sequence
gaaattaatacgactcactatagaaaacagcatagcaagttaaaataaagttaaaataa

SEQ ID NO: 341 - DNA, 25 bp, Artificial Sequence
  Synthetic sequence
aaaaaaagcaccgactcggtgccac

SEQ ID NO: 342 - DNA, 66 bp, Artificial Sequence
  Synthetic sequence
gaaattaatacgactcactatagggatttcttcttgcgctttttgttttagagctatgctgttttg

SEQ ID NO: 343 - DNA, 66 bp, Artificial Sequence
  Synthetic sequence
caaaacagcatagctctaaaacaaaaagcgcaagaagaaatccctatagtgagtcgtattaatttc

SEQ ID NO: 344 - DNA, 66 bp, Artificial Sequence
  Synthetic sequence
gaaattaatacgactcactataggataactcaatttgtaaaaaagttttagagctatgctgttttg

SEQ ID NO: 345 - DNA, 66 bp, Artificial Sequence
  Synthetic sequence
caaaacagcatagctctaaaacttttttacaaattgagttatcctatagtgagtcgtattaatttc

SEQ ID NO: 346 - DNA, 51 bp, Artificial Sequence
  Synthetic sequence
gaaattaatacgactcactatagatgatgagaaccgttgctacaataaggc

SEQ ID NO: 347 - DNA, 24 bp, Artificial Sequence
  Synthetic sequence
aaataaacgatgccccttaaagca

SEQ ID NO: 348 - DNA, 68 bp, Artificial Sequence
  Synthetic sequence
gaaattaatacgactcactatagatgataactcaatttgtaaaaaagttgtagctccctttctcattt

SEQ ID NO: 349 - DNA, 68 bp, Artificial Sequence
  Synthetic sequence
aaatgagaaagggagctacaacttttttacaaattgagttatcatctatagtgagtcgtattaatttc

SEQ ID NO: 350 - DNA, 51 bp, Artificial Sequence
  Synthetic sequence
gaaattaatacgactcactatagatgaaataacatagcaagttaaaataag

SEQ ID NO: 351 - DNA, 31 bp, Artificial Sequence
  Synthetic sequence
aaaaaaagcgccgaaacagcgctacttaatt

SEQ ID NO: 352 - DNA, 68 bp, Artificial Sequence
  Synthetic sequence
gaaattaatacgactcactatagatgataactcaatttgtaaaaaagttttagagctatgttattttg

SEQ ID NO: 353 - DNA, 68 bp, Artificial Sequence
  Synthetic sequence
caaaataacatagctctaaaacttttttacaaattgagttatcatctatagtgagtcgtattaatttc

SEQ ID NO: 354 - DNA, 35 bp, Artificial Sequence
  Synthetic sequence
atgcacctgcaggatgctgttaaataattgtatac

SEQ ID NO: 355 - DNA, 36 bp, Artificial Sequence
  Synthetic sequence
atgcacggatccagctgctctaagtctactaaaacc

SEQ ID NO: 356 - DNA, 39 bp, Artificial Sequence
  Synthetic sequence
atgcagggccggccgtgacagagagaaacttgattcaac

SEQ ID NO: 357 - DNA, 39 bp, Artificial Sequence
  Synthetic sequence
atgcagggccggcccttcgtttaagtaaacatcaaagtg

SEQ ID NO: 358 - DNA, 59 bp, Artificial Sequence
  Synthetic sequence
atgagcgataatagaataaagttatatgagcataactcaatttgtaaaaaagggtattg

SEQ ID NO: 359 - DNA, 59 bp, Artificial Sequence
  Synthetic sequence
caatacccttttttacaaattgagttatgctcatataactttattctattatcgctcat

SEQ ID NO: 360 - DNA, 57 bp, Artificial Sequence
  Synthetic sequence
gcgataatagaataaagttatatgaacataactcaatctgtaaaaaagggtattggg

SEQ ID NO: 361 - DNA, 57 bp, Artificial Sequence
  Synthetic sequence
cccaatacccttttttacagattgagttatgttcatataactttattctattatcgc

SEQ ID NO: 362 - DNA, 40 bp, Artificial Sequence
  Synthetic sequence
gaacataactcaatttgaaaaaaagggtattggggaattc

SEQ ID NO: 363 - DNA, 40 bp, Artificial Sequence
  Synthetic sequence
gaattccccaataccctttttttcaaattgagttatgttc

SEQ ID NO: 364 - DNA, 40 bp, Artificial Sequence
  Synthetic sequence
gaacataactcaatttgttaaaaagggtattggggaattc

SEQ ID NO: 365 - DNA, 40 bp, Artificial Sequence
  Synthetic sequence
gaattccccaataccctttttaacaaattgagttatgttc

SEQ ID NO: 366 - DNA, 43 bp, Artificial Sequence
  Synthetic sequence
gaacataactcaatttgtataaaagggtattggggaattcatt

SEQ ID NO: 367 - DNA, 43 bp, Artificial Sequence
  Synthetic sequence
aatgaattccccaatacccttttatacaaattgagttatgttc

SEQ ID NO: 368 - DNA, 43 bp, Artificial Sequence
  Synthetic sequence
gaacataactcaatttgtaataaagggtattggggaattcatt

SEQ ID NO: 369 - DNA, 43 bp, Artificial Sequence
  Synthetic sequence
aatgaattccccaataccctttattacaaattgagttatgttc

SEQ ID NO: 370 - DNA, 40 bp, Artificial Sequence
  Synthetic sequence
cataactcaatttgtaaataagggtattggggaattcatt

SEQ ID NO: 371 - DNA, 40 bp, Artificial Sequence
  Synthetic sequence
aatgaattccccaatacccttatttacaaattgagttatg

SEQ ID NO: 372 - DNA, 46 bp, Artificial Sequence
  Synthetic sequence
cataactcaatttgtaaaaaagcgtattggggaattcattataaag

SEQ ID NO: 373 - DNA, 46 bp, Artificial Sequence
  Synthetic sequence
ctttataatgaattccccaatacgcttttttacaaattgagttatg

SEQ ID NO: 374 - DNA, 44 bp, Artificial Sequence
  Synthetic sequence
cataactcaatttgtaaaaaagcctattggggaattcattataa

SEQ ID NO: 375 - DNA, 44 bp, Artificial Sequence
  Synthetic sequence
ttataatgaattccccaataggcttttttacaaattgagttatg

SEQ ID NO: 376 - DNA, 38 bp, Artificial Sequence
  Synthetic sequence
atgcagggccggccagtatcagcgtacttggatttggg

SEQ ID NO: 377 - DNA, 37 bp, Artificial Sequence
  Synthetic sequence
atgcagggccggccttgtctcactcactctatttttg

SEQ ID NO: 378 - DNA, 30 bp, Artificial Sequence
  Synthetic sequence
gatttcttgcgcttttttggctttttcgag

SEQ ID NO: 379 - DNA, 30 bp, Artificial Sequence
  Synthetic sequence
gggatggcaatccatgggtcaaggtactag

SEQ ID NO: 380 - DNA, 20 bp, Artificial Sequence
  Synthetic sequence
ggaacgaaaactcacgttaa

SEQ ID NO: 381 - DNA, 25 bp, Artificial Sequence
  Synthetic sequence
tgagagtgtcttttcagatgctgtg

SEQ ID NO: 382 - DNA, 21 bp, Artificial Sequence
  Synthetic sequence
agcggtatctgttccccaaaa

SEQ ID NO: 383 - DNA, 21 bp, Artificial Sequence
  Synthetic sequence
gttaaaaaccacgtaaccaca

SEQ ID NO: 384 - RNA, 42 nt, Artificial Sequence; identical to SEQ ID NO: 303
  Synthetic sequence

SEQ ID NO: 385 - RNA, 42 nt, Artificial Sequence; identical to SEQ ID NO: 280
  Synthetic sequence

SEQ ID NO: 386 - RNA, 42 nt, Artificial Sequence; identical to SEQ ID NO: 306
  Synthetic sequence

SEQ ID NO: 387 - RNA, 36 nt, Artificial Sequence
  Synthetic sequence
auaacucaauuuguaaaaaaguuuuagagcuaugcu

SEQ ID NO: 388 - RNA, 32 nt, Artificial Sequence
  Synthetic sequence
auaacucaauuuguaaaaaaguuuuagagcua

SEQ ID NO: 389 - RNA, 22 nt, Artificial Sequence
  Synthetic sequence
uuguaaaaaaguuuuagagcua

SEQ ID NO: 390 - RNA, 89 nt, Artificial Sequence
  Synthetic sequence
guuggaaccauucaaaacagcauagcaaguuaaaauaaggcuaguccguuaucaacuugaaaaaguggcaccgagucggugcuuuuuuu

SEQ ID NO: 391 - RNA, 74 nt, Artificial Sequence
  Synthetic sequence
aacagcauagcaaguuaaaauaaggcuaguccguuaucaacuugaaaaaguggcaccgagucggugcuuuuuuu

SEQ ID NO: 392 - RNA, 67 nt, Artificial Sequence
  Synthetic sequence
uagcaaguuaaaauaaggcuaguccguuaucaacuugaaaaaguggcaccgagucggugcuuuuuuu

SEQ ID NO: 393 - RNA, 39 nt, Artificial Sequence
  Synthetic sequence
aaacagcauagcaaguuaaaauaaggcuaguccguuauc

SEQ ID NO: 394 - RNA, 30 nt, Artificial Sequence
  Synthetic sequence
aaacagcauagcaaguuaaaauaaggcuag

SEQ ID NO: 395 - RNA, 22 nt, Artificial Sequence
  Synthetic sequence
aaacagcauagcaaguuaaaau

SEQ ID NO: 396 - RNA, 31 nt, Artificial Sequence
  Synthetic sequence
uagcaaguuaaaauaaggcuaguccguuauc

SEQ ID NO: 397 - RNA, 26 nt, Artificial Sequence
  Synthetic sequence
uagcaaguuaaaauaaggcuaguccg

SEQ ID NO: 398 - RNA, 22 nt, Artificial Sequence
  Synthetic sequence
uagcaaguuaaaauaaggcuag

SEQ ID NO: 399 - RNA, 26 nt, Artificial Sequence
  Synthetic sequence
guuggaaccauucaaaacagcauagc

SEQ ID NO: 400 - RNA, 62 nt, Artificial Sequence; identical to SEQ ID NO: 321
  Synthetic sequence

SEQ ID NO: 401 - RNA, 54 nt, Artificial Sequence; identical to SEQ ID NO: 322
  Synthetic sequence

SEQ ID NO: 402 - RNA, 62 nt, Artificial Sequence; identical to SEQ ID NO: 323
  Synthetic sequence

SEQ ID NO: 403 - RNA, 54 nt, Artificial Sequence; identical to SEQ ID NO: 324
  Synthetic sequence

SEQ ID NO: 404 - RNA, 62 nt, Artificial Sequence; identical to SEQ ID NO: 299
  Synthetic sequence

SEQ ID NO: 405 - RNA, 54 nt, Artificial Sequence; identical to SEQ ID NO: 300
  Synthetic sequence

SEQ ID NO: 406 - RNA, 62 nt, Artificial Sequence
  Synthetic sequence
ccaauucuuguugaauuagaguuuuagagcuagaaauagcaaguuaaaauaaggcuaguccg

SEQ ID NO: 407 - RNA, 62 nt, Artificial Sequence
  Synthetic sequence
aauuagauggugauguuaauguuuuagagcuagaaauagcaaguuaaaauaaggcuaguccg

SEQ ID NO: 408 - RNA, 62 nt, Artificial Sequence
  Synthetic sequence
aaauuuucugucaguggagaguuuuagagcuagaaauagcaaguuaaaauaaggcuaguccg

SEQ ID NO: 409 - RNA, 62 nt, Artificial Sequence
  Synthetic sequence
caucuaauucaacaagaauuguuuuagagcuagaaauagcaaguuaaaauaaggcuaguccg

SEQ ID NO: 410 - RNA, 61 nt, Artificial Sequence
  Synthetic sequence
caguagugcaaauaaauuuaguuuuagagcuagaaauagcaaguuaaaauaaggcuagccg

SEQ ID NO: 411 - DNA, 50 bp, Artificial Sequence; identical to SEQ ID NO: 302
  Synthetic sequence

SEQ ID NO: 412 - DNA, 50 bp, Artificial Sequence; identical to SEQ ID NO: 301
  Synthetic sequence

SEQ ID NO: 413 - DNA, 50 bp, Artificial Sequence; identical to SEQ ID NO: 279
  Synthetic sequence

SEQ ID NO: 414 - DNA, 50 bp, Artificial Sequence; identical to SEQ ID NO: 278
  Synthetic sequence

SEQ ID NO: 415 - DNA, 50 bp, Artificial Sequence; identical to SEQ ID NO: 305
  Synthetic sequence

SEQ ID NO: 416 - DNA, 50 bp, Artificial Sequence; identical to SEQ ID NO: 304
  Synthetic sequence

SEQ ID NO: 417 - DNA, 50 bp, Artificial Sequence
  Synthetic sequence
taatgaattccccaataggcttttttacaaattgagttatgttcatataa

SEQ ID NO: 418 - DNA, 50 bp, Artificial Sequence
  Synthetic sequence
ttatatgaacataactcaatttgtaaaaaagcctattggggaattcatta

SEQ ID NO: 419 - DNA, 50 bp, Artificial Sequence
  Synthetic sequence
taatgaattcccgttatggcttttttacaaattgagttatgttcatataa

SEQ ID NO: 420 - DNA, 50 bp, Artificial Sequence
  Synthetic sequence
ttatatgaacataactcaatttgtaaaaaagccataacgggaattcatta

SEQ ID NO: 421 - DNA, 50 bp, Artificial Sequence
  Synthetic sequence
taatgcgcgagccaagcgcacctaatttttcctcggcacttaatataacc

SEQ ID NO: 422 - DNA, 50 bp, Artificial Sequence
  Synthetic sequence
ggttatattaagtgccgaggaaaaattaggtgcgcttggctcgcgcatta

SEQ ID NO: 423 - DNA, 50 bp, Artificial Sequence; identical to SEQ ID NO: 338
  Synthetic sequence

SEQ ID NO: 424 - DNA, 50 bp, Artificial Sequence; identical to SEQ ID NO: 337
  Synthetic sequence

SEQ ID NO: 425 - DNA, 74 bp, Artificial Sequence
  Synthetic sequence
tcagtcctcatctccctcaagcaggccccgctggtgcactgaagagccaccctgtggaaacactacatctgcaa

SEQ ID NO: 426 - DNA, 74 bp, Artificial Sequence
  Synthetic sequence
ttgcagatgtagtgtttccacagggtggctcttcagtgcaccagcggggcctgcttgagggagatgaggactga

SEQ ID NO: 427 - DNA, 20 bp, Artificial Sequence
  Synthetic sequence
tgtggaaacactacatctgc

SEQ ID NO: 428 - RNA, 62 nt, Artificial Sequence
  Synthetic sequence
gcagauguaguguuuccacaguuuuagagcuagaaauagcaaguuaaaauaaggcuaguccg

SEQ ID NO: 429 - RNA, 75 nt, Artificial Sequence
  Synthetic sequence
gcagauguaguguuuccacaguuuuagagcuaugcugaaaagcauagcaaguuaaaauaaggcuaguccguuauc

SEQ ID NO: 430 - RNA, 87 nt, Artificial Sequence
  Synthetic sequence
gcagauguaguguuuccacaguuuuagagcuaugcuguuuuggaaacaaaacagcauagcaaguuaaaauaaggcuaguccguuauc

SEQ ID NO: 431 - RNA, 86 nt, Artificial Sequence
  Synthetic sequence
ggaaccauucaaaacagcauagcaaguuaaaauaaggcuaguccguuaucaacuugaaaaaguggcaccgagucggugcuuuuuuu

SEQ ID NO: 432 - RNA, 67 nt, Artificial Sequence; identical to SEQ ID NO: 392
  Synthetic sequence

SEQ ID NO: 433 - RNA, 88 nt, Streptococcus pyogenes
guuggaaccauucaaaacagcauagcaaguuaaaauaaggcuaguccguuaucaacuugaaaaaguggcaccgagucggugcuuuuuu

SEQ ID NO: 434 - RNA, 93 nt, Listeria innocua
auauuguuaguauucaaaauaacauagcaaguuaaaauaaggcuuuguccguuaucaacuuuuaauuaaguagcgcuguuucggcgcuuuuuu

SEQ ID NO: 435 - RNA, 104 nt, Streptococcus mutans
uguuggaaucauucgaaacaacacagcaaguuaaaauaaggcagugauuuuuaauccaguccguacacaacuugaaaaagugcgcaccgauucggugcuuuuuu

SEQ ID NO: 436 - RNA, 95 nt, Streptococcus thermophilus
uugugguuugaaaccauucgaaacaacacagcgaguuaaaauaaggcuuaguccguacucaacuugaaaagguggcaccgauucgguguuuuuuu

SEQ ID NO: 437 - RNA, 118 nt, Streptococcus thermophilus
uaauaauaguguaagggacgccuuacacaguuacuuaaaucuugcagaagcuacaaagauaaggcuucaugccgaaaucaacacccugucauuuuauggcaggguguuuucguuauuu

SEQ ID NO: 438 - RNA, 112 nt, Neisseria meningitidis
cauauugucgcacugcgaaaugagaaccguugcuacaauaaggccgucugaaaagaugugccgcaacgcucugccccuuaaagcuucugcuuuaaggggcaucguuuauuuc

SEQ ID NO: 439 - RNA, 110 nt, Pasteurella multocida
gcauauuguugcacugcgaaaugagagacguugcuacaauaaggcuucugaaaagaaugaccguaacgcucugccccuugugauucuuaauugcaaggggcaucguuuuu

SEQ ID NO: 440 - RNA, 115 nt, Mycoplasma mobile
uauuauguauuucgaaauacagauguacaguuaagaauacauaagaaugauacaucacuaaaaaaaggcuuuaugccguaacuacuacuuauuuucaaaauaaguaguuuuuuuu

SEQ ID NO: 441 - RNA, 26 nt, Artificial Sequence
  Synthetic sequence
uagcaaguuaaaauaaggcuaguccg

SEQ ID NO: 442 - RNA, 36 nt, Streptococcus pyogenes
uuguuggaaccauucaaaacagcauagcaaguuaaa

SEQ ID NO: 443 - RNA, 36 nt, Streptococcus mutans
guguuggaaucauucgaaacaacacagcaaguuaaa

SEQ ID NO: 444 - RNA, 36 nt, Streptococcus thermophilus
gguuugaaaccauucgaaacaacacagcgaguuaaa

SEQ ID NO: 445 - RNA, 36 nt, Streptococcus thermophilus
cuuacacaguuacuuaaaucuugcagaagcuacaaa

SEQ ID NO: 446 - RNA, 36 nt, Listeria innocua
auauuguuaguauucaaaauaacauagcaaguuaaa

SEQ ID NO: 447 - RNA, 34 nt, Listeria innocua
auuguuaguauucaaaauaacauagcaaguuaaa

SEQ ID NO: 448 - RNA, 36 nt, Treponema denticola
auuuaagauccaucuuaaauuacacaacgaguucaa

SEQ ID NO: 449 - RNA, 36 nt, Neisseria meningitidis
auugucgcacugcgaaaugagaaccguugcuacaau

SEQ ID NO: 450 - RNA, 38 nt, Neisseria meningitidis
auauugucgcacugcgaaaugagaaccguugcuacaau

SEQ ID NO: 451 - RNA, 36 nt, Streptococcus gordonii; identical to SEQ ID NO: 445

SEQ ID NO: 452 - RNA, 36 nt, Bifidobacterium bifidum
augaucaaggucauugaccugacaggcauaaauuga

SEQ ID NO: 453 - RNA, 36 nt, Lactobacillus salivarius
gguuuugaccucauugauuuaacauucugaguugaa

SEQ ID NO: 454 - RNA, 37 nt, Francisella tularensis
guuucaguuguuagauuauuugguauguacuuguguu

SEQ ID NO: 455 - RNA, 37 nt, Francisella tularensis
auuacagagcauuaauuauuugguacauuuauaauuu

SEQ ID NO: 456 - RNA, 37 nt, Legionella pneumophila
auuucaggguaucgaaauuuagaugauuucuaauuua

SEQ ID NO: 457 - RNA, 36 nt, Nitratifractor salsuginis
uguaacaggguaggguuuuuugaggggucuuaaaau

SEQ ID NO: 458 - RNA, 36 nt, Butyrivibrio fibrisolvens
aguuucuaaucacuuaauuuuuucggaccuacuaaa

SEQ ID NO: 459 - RNA, 36 nt, Streptobacillus moniliformis
gauucacauuauucaaguuuacuacagauucuguau

SEQ ID NO: 460 - RNA, 36 nt, Mycoplasma mobile
aguuaagaauacauaagaaugauacaucacuaaaaa

SEQ ID NO: 461 - RNA, 44 nt, Capnocytophaga ochracea
auugugaauugcuuucaaauugugcgacaaaaguagguauaaua

SEQ ID NO: 462 - RNA, 36 nt, Acidovorax ebreus
auugcagcaacggcucucaccccggauaaccacaau

SEQ ID NO: 463 - RNA, 36 nt, Wolinella succinogenes
auagccgcugccuacucagccauuuagcgcagcgac

SEQ ID NO: 464 - RNA, 37 nt, Wolinella succinogenes
uuuguuaaagcuggaugggauuauuauagaguguugc

SEQ ID NO: 465 - RNA, 37 nt, Wolinella succinogenes
uuucaaggcaucgaacggauuugcuauaaaguguugc

SEQ ID NO: 466 - RNA, 36 nt, Prevotella ruminicola
uuuugcacacguaagauuccuacaucuuaucacaau

SEQ ID NO: 467 - RNA, 48 nt, Fibrobacter succinogenes
auugugaauugcuuucagauuaugaaaauaauauaguuaaaauuuuug

SEQ ID NO: 468 - RNA, 36 nt, Campylobacter jejuni
auuuuauuucgauuuuaaucaacccuaaauuucaau

SEQ ID NO: 469 - RNA, 36 nt, Campylobacter jejuni
auuuuagucccuuuuuaaauuucuuaugagauuaua

SEQ ID NO: 470 - RNA, 25 nt, Campylobacter jejuni
aagaaauuuaaaaagggacuaaaau

SEQ ID NO: 471 - RNA, 36 nt, Pasteurella multocida
auuguagcaacgucucucauuucgcagugcaacaau

SEQ ID NO: 472 - RNA, 36 nt, Rhodopseudomonas palustris
gccguggcuuuccuaccgauuucccaccgcaugauu

SEQ ID NO: 473 - RNA, 36 nt, Olsenella uli
ucugaauuaccagucagaacgauacugcgagucaaa

SEQ ID NO: 474 - RNA, 36 nt, Rhodospirillum rubrum
guuccauggccccgucccacacgccaugauagagcg

SEQ ID NO: 475 - RNA, 36 nt, Rhodospirillum rubrum
aaacgggagaaccgucccacacggccaugguagagu

SEQ ID NO: 476 - RNA, 36 nt, Dinoroseobacter shibae
uuaacggcucgaccgcgaauucugaacguaaagaca

SEQ ID NO: 477 - RNA, 36 nt, Verminephrobacter eiseniae
uuagcguccagagcgcauaucccagugagauauccg

SEQ ID NO: 478 - RNA, 75 nt, Streptococcus pyogenes
aaacagcauagcaaguuaaaauaaggcuaguccguuaucaacuugaaaaaguggcaccgagucggugcuuuuuuu

SEQ ID NO: 479 - RNA, 77 nt, Listeria innocua
aaauaacauagcaaguuaaaauaaggcuuuguccguuaucaacuuuuaauuaaguagcgcuguuucggcgcuuuuuu

SEQ ID NO: 480 - RNA, 73 nt, Artificial Sequence
  Synthetic sequence
aacagcauagcaaguuaaaauaaggcuaguccguuaucaacuugaaaaaguggcaccgagucggugcuuuuuu

SEQ ID NO: 481 - RNA, 33 nt, Francisella novicida
uauaaauguaccaaauaauuaaugcucuguaau

SEQ ID NO: 482 - RNA, 74 nt, Campylobacter jejuni
aagaaauuuaaaaagggacuaaaauaaagaguuugcgggacucugcgggguuacaauccccuaaaaccgcuuuu

SEQ ID NO: 483 - RNA, 96 nt, Francisella novicida
aucuaaaauuauaaauguaccaaauaauuaaugcucuguaaucauuuaaaaguauuuugaacggaccucuguuugacacgucugaauaacuaaaaa

SEQ ID NO: 484 - RNA, 109 nt, Streptococcus thermophilus2
uguaagggacgccuuacacaguuacuuaaaucuugcagaagcuacaaagauaaggcuucaugccgaaaucaacacccugucauuuuauggcaggguguuuucguuauuu

SEQ ID NO: 485 - RNA, 110 nt, Mycoplasma mobile
uguauuucgaaauacagauguacaguuaagaauacauaagaaugauacaucacuaaaaaaaggcuuuaugccguaacuacuacuuauuuucaaaauaaguaguuuuuuuu

SEQ ID NO: 486 - RNA, 92 nt, Listeria innocua
auuguuaguauucaaaauaacauagcaaguuaaaauaaggcuuuguccguuaucaacuuuuaauuaaguagcgcuguuucggcgcuuuuuuu

SEQ ID NO: 487 - RNA, 89 nt, Streptococcus pyogenes; identical to SEQ ID NO: 390

SEQ ID NO: 488 - RNA, 107 nt, Streptococcus mutans
guuggaaucauucgaaacaacacagcaaguuaaaauaaggcagugauuuuuaauccaguccguacacaacuugaaaaagugcgcaccgauucggugcuuuuuuauuu

SEQ ID NO: 489 - RNA, 96 nt, Streptococcus thermophilus
uugugguuugaaaccauucgaaacaacacagcgaguuaaaauaaggcuuaguccguacucaacuugaaaagguggcaccgauucgguguuuuuuuu

SEQ ID NO: 490 - RNA, 102 nt, Neisseria meningitidis
acauauugucgcacugcgaaaugagaaccguugcuacaauaaggccgucugaaaagaugugccgcaacgcucugccccuuaaagcuucugcuuuaaggggca

SEQ ID NO: 491 - RNA, 110 nt, Pasteurella multocida; identical to SEQ ID NO: 439

SEQ ID NO: 492 - RNA, 37 nt, Francisella novicida
aacacaaguacauaccaaauaaucuaacaacugaaac

SEQ ID NO: 493 - RNA, 37 nt, Francisella novicida
aaauuauaaauguaccaaauaauuaaugcucuguaau

SEQ ID NO: 494 - RNA, 37 nt, Wolinella succinogenes; identical to SEQ ID NO: 465

SEQ ID NO: 495 - RNA, 37 nt, Wolinella succinogenes; identical to SEQ ID NO: 464

SEQ ID NO: 496 - RNA, 37 nt, gamma proteobacterium
auuucaguguauagaauguugggaugcauucugaaua

SEQ ID NO: 497 - RNA, 37 nt, gamma proteobacterium
auaacaagggaguauuugcuggaauaagcucugaaac

SEQ ID NO: 498 - RNA, 37 nt, Sutterella wadsworthensis
guuuccaagcaauagcucguggcguuaugauuucugu

SEQ ID NO: 499 - RNA, 37 nt, Sutterella wadsworthensis
ggugauuuccuauagcucauagcguuaugaucucuaa

SEQ ID NO: 500 - RNA, 37 nt, Legionella pneumophila; identical to SEQ ID NO: 456

SEQ ID NO: 501 - RNA, 36 nt, Listeria innocua; identical to SEQ ID NO: 446

SEQ ID NO: 502 - RNA, 36 nt, Streptococcus thermophilus; identical to SEQ ID NO: 444

SEQ ID NO: 503 - RNA, 36 nt, Streptococcus mutans; identical to SEQ ID NO: 443

SEQ ID NO: 504 - RNA, 36 nt, Streptococcus pyogenes; identical to SEQ ID NO: 442

SEQ ID NO: 505 - RNA, 36 nt, Fusobacterium nucleatum
auuuuuaauuuaaguaauaaaaaauggagcauauac

SEQ ID NO: 506 - RNA, 36 nt, Filifactor alocis
aguugacuaccauaugagauuacacuacacgguuca

SEQ ID NO: 507 - RNA, 36 nt, Treponema denticola; identical to SEQ ID NO: 448

SEQ ID NO: 508 - RNA, 36 nt, Solobacterium moorei
cuuauaccaguaagauaauuuacauaguaaguucaa

SEQ ID NO: 509 - RNA, 36 nt, Veillonella atypica
guuuuggagguuuacagaauuacacuacgaguucaa

SEQ ID NO: 510 - RNA, 36 nt, Finegoldia magna
guuuaauaccuauaugagauuacaucaugaguucaa

SEQ ID NO: 511 - RNA, 36 nt, Olsenella uli; identical to SEQ ID NO: 473

SEQ ID NO: 512 - RNA, 36 nt, Lactobacillus rhamnosus
caacuugaauugauugaucugacaucuacgaguuga

SEQ ID NO: 513 - RNA, 36 nt, Lactobacillus gasseri
ugauuagauuucauugaucuaacagccaucuaaaac

SEQ ID NO: 514 - RNA, 36 nt, Lactobacillus gasseri
acacuaaacuuuauugaucuaacaaccagauuuaaa

SEQ ID NO: 515 - RNA, 36 nt, Oenococcus kitaharae
ggguucuaccucauugaucugacacacagcauugaa

SEQ ID NO: 516 - RNA, 36 nt, Bifidobacterium bifidum; identical to SEQ ID NO: 452

SEQ ID NO: 517 - RNA, 36 nt, Staphylococcus pseudintermedius
guuuuacuucuuucuaaauaaacauaguuaaguuaa

SEQ ID NO: 518 - RNA, 36 nt, Eubacterium rectale
auuuuauagucacguaaauuuuucagaucuacuaaa

SEQ ID NO: 519 - RNA, 38 nt, Enterococcus faecalis
auuuuacugauaagaaauuauugagaaucuacaaaaau

SEQ ID NO: 520 - RNA, 36 nt, Streptococcus thermophilus; identical to SEQ ID NO: 445

SEQ ID NO: 521 - RNA, 36 nt, Staphylococcus lugdunensis
cuuguacuuauaccuaaaauuacagaaucuacugaa

SEQ ID NO: 522 - RNA, 36 nt, Eubacterium dolichum
aucauaaucuagcaaaaguuuauaugaucuaacaaa

SEQ ID NO: 523 - RNA, 36 nt, Mycoplasma mobile; identical to SEQ ID NO: 460

SEQ ID NO: 524 - RNA, 36 nt, Mycoplasma ovipneumoniae
auuuuacucuaguaagaaauugucgcacaaaaauaa

SEQ ID NO: 525 - RNA, 36 nt, Mycoplasma gallisepticum
auuauugcuuacacaauuauugucgugcuaaaauaa

SEQ ID NO: 526 - RNA, 36 nt, Mycoplasma canis
auuauuguuuacccaaauauuguacauccuaaauca

SEQ ID NO: 527 - RNA, 36 nt, Mycoplasma synoviae
uacuuacuuaacaaaauaauuguacgauuccaaaau

SEQ ID NO: 528 - RNA, 36 nt, Aminomonas paucivorans
gccuucccucccugccgaaggagcagauccucuccu

SEQ ID NO: 529 - RNA, 36 nt, Clostridium perfringens
uuauaguaacuaguuaaacucucgauaugcuauacc

SEQ ID NO: 530 - RNA, 36 nt, Clostridium cellulolyticum
auuauagcaacaauucaggcuccgauaugccauaau

SEQ ID NO: 531 - RNA, 36 nt, Acidovorax ebreus; identical to SEQ ID NO: 462

SEQ ID NO: 532 - RNA, 36 nt, Neisseria meningitidis; identical to SEQ ID NO: 449

SEQ ID NO: 533 - RNA, 36 nt, Pasteurella multocida
auuguugcacugcgaaaugagagacguugcuacaau

SEQ ID NO: 534 - RNA, 36 nt, phylotype Rs-D17
uuuguaacuuaucugagagaggaugguuauuauaau

SEQ ID NO: 535 - RNA, 36 nt, Wolinella succinogenes; identical to SEQ ID NO: 463

SEQ ID NO: 536 - RNA, 36 nt, Campylobacter jejuni
auaauacaaaaaucauuuuuuuaaacaaacauaaac

SEQ ID NO: 537 - RNA, 36 nt, Campylobacter jejuni
uauaaucucauaagaaauuuaaaaagggacuaaaau

SEQ ID NO: 538 - RNA, 36 nt, Helicobacter mustelae
guauuugucaauaaauauacuuuauaauggcaagau

SEQ ID NO: 539 - RNA, 36 nt, Roseburia intestinalis
uuguaauaaccuaauuaucacuugguaugauauaau

SEQ ID NO: 540 - RNA, 36 nt, Lactobacillus coryniformis
uuuuauucuauaguaaguuuucagcuaaaauagauc

SEQ ID NO: 541 - RNA, 36 nt, Rhodopseudomonas palustris; identical to SEQ ID NO: 472

SEQ ID NO: 542 - RNA, 36 nt, Cand. Puniceispirillum marinum
uaaccauaggcuccucaaucaccagaguguuauugc

SEQ ID NO: 543 - RNA, 36 nt, Verminephrobacter eiseniae; identical to SEQ ID NO: 477

SEQ ID NO: 544 - RNA, 36 nt, Ralstonia syzygii
guuaguagcaaagcgcaauucccgaucugcuggaaa

SEQ ID NO: 545 - RNA, 36 nt, Azospirillum B510
uuaacggcuggacccccgauccccaucgaauuucca

SEQ ID NO: 546 - RNA, 36 nt, Dinoroseobacter shibae; identical to SEQ ID NO: 476

SEQ ID NO: 547 - RNA, 36 nt, Rhodospirillum rubrum; identical to SEQ ID NO: 474

SEQ ID NO: 548 - RNA, 36 nt, Rhodospirillum rubrum; identical to SEQ ID NO: 475

SEQ ID NO: 549 - RNA, 36 nt, Spirochaeta Buddy
auuagagauaaucgcugguuuuuguuaagauauaac

SEQ ID NO: 550 - RNA, 36 nt, Prevotella ruminicola; identical to SEQ ID NO: 466

SEQ ID NO: 551 - RNA, 36 nt, Flavobacterium columnare
agauaaaauuauucuaaucuuuaaucuuaucacaau

SEQ ID NO: 552 - RNA, 36 nt, Parvibaculum lavamentivorans
cuugcgaaaagcgaccgccucucgauuugcuacaga

SEQ ID NO: 553 - RNA, 44 nt, Capnocytophaga ochracea; identical to SEQ ID NO: 461

SEQ ID NO: 554 - RNA, 48 nt, Fibrobacter succinogenes; identical to SEQ ID NO: 467

SEQ ID NO: 555 - RNA, 36 nt, Nitratifractor salsuginis; identical to SEQ ID NO: 457

SEQ ID NO: 556 - RNA, 36 nt, Akkermansia muciniphila
cuuauacgggaacuccacgauaaggcauuuuacaug

SEQ ID NO: 557 - RNA, 88 nt, Artificial Sequence
  Synthetic sequence
uuggaaccauucaaaacagcauagcaaguuaaaauaaggcuaguccguuaucaacuugaaaaaguggcaccgagucggugcuuuuuuu

SEQ ID NO: 558 - RNA, 77 nt, Artificial Sequence
  Synthetic sequence
caaaacagcauagcaaguuaaaauaaggcuaguccguuaucaacuugaaaaaguggcaccgagucggugcuuuuuuu

SEQ ID NO: 559 - RNA, 61 nt, Artificial Sequence
  Synthetic sequence
caaaacagcauagcaaguuaaaauaaggcuaguccguuaucaacuugaaaaaguuuuuuuu

SEQ ID NO: 560 - RNA, 44 nt, Artificial Sequence
  Synthetic sequence
caaaacagcauagcaaguuaaaauaaggcuaguccguuuuuuuu

SEQ ID NO: 561 - RNA, 72 nt, Artificial Sequence
  Synthetic sequence
caaaacagcauagcaaguuaaaauaaggcuaguccgguucacugccguauaggcagcuaagaaauuuuuuuu

SEQ ID NO: 562 - RNA, 14 nt, Artificial Sequence
  Synthetic sequence
uagcaaguuaaaau

SEQ ID NO: 563 - RNA, 102 nt, Artificial Sequence
  Synthetic sequence
  misc_feature (1)..(80): n is a, c, g, or u
nnnnnnnnnnnnnnnnnnnnnnnnnnnnnnnnnnnnnnnnnnnnnnnnnnnnnnnnnnnnnnnnnnnnnnnnnnnnnnnnguuuuagagcuaugcuguuuug

SEQ ID NO: 564 - RNA, 102 nt, Artificial Sequence
  Synthetic sequence
  misc_feature (1)..(80): n is a, c, g, or u
nnnnnnnnnnnnnnnnnnnnnnnnnnnnnnnnnnnnnnnnnnnnnnnnnnnnnnnnnnnnnnnnnnnnnnnnnnnnnnnnguuuuagagcuauguuauuuug

SEQ ID NO: 565 - RNA, 92 nt, exemplary
  misc_feature (1)..(80): n is a, c, g, or u
nnnnnnnnnnnnnnnnnnnnnnnnnnnnnnnnnnnnnnnnnnnnnnnnnnnnnnnnnnnnnnnnnnnnnnnnnnnnnnnnguuuuagagcua

SEQ ID NO: 566 - RNA, 152 nt, Artificial Sequence
  Synthetic sequence
  misc_feature (37)..(116): n is a, c, g, or u
guuuuagagcuaugcuguuuugaauggucccaaaacnnnnnnnnnnnnnnnnnnnnnnnnnnnnnnnnnnnnnnnnnnnnnnnnnnnnnnnnnnnnnnnnnnnnnnnnnnnnnnnnguuuuagagcuaugcuguuuugaauggucccaaaac

SEQ ID NO: 567 - RNA, 188 nt, Artificial Sequence
  Synthetic sequence
  misc_feature (37)..(116): n is a, c, g, or u
guuuuagagcuaugcuguuuugaauggucccaaaacnnnnnnnnnnnnnnnnnnnnnnnnnnnnnnnnnnnnnnnnnnnnnnnnnnnnnnnnnnnnnnnnnnnnnnnnnnnnnnnnguuuuagagcuaugcuguuuugaauggucccaaaacguuuuagagcuaugcuguuuugaauggucccaaaac

SEQ ID NO: 568 - RNA, 22 nt, exemplary
guuuuagagcuaugcuguuuug

SEQ ID NO: 569 - RNA, 36 nt, Streptococcus pyogenes
guuuuagagcuaugcuguuuugaauggucccaaaac

SEQ ID NO: 570 - RNA, 36 nt, Pasteurella multocida
guuguaguucccucucucauuucgcagugcuacaau

SEQ ID NO: 571 - RNA, 36 nt, Mycoplasma mobile
guuuugguguaguaucauucuuauguauucuuaaac

SEQ ID NO: 572 - RNA, 37 nt, Francisella novicida
guuucaguugcugaauuauuugguaaacuacuguuag

SEQ ID NO: 573 - RNA, 33 nt, Francisella novicida
guuucaguugcugaauuauuugguaaacuacug

SEQ ID NO: 574 - RNA, 36 nt, Streptococcus mutans
guuuuagagcuguguuguuucgaaugguuccaaaac

SEQ ID NO: 575 - RNA, 36 nt, Streptococcus thermophilus; identical to SEQ ID NO: 574

SEQ ID NO: 576 - RNA, 36 nt, Streptococcus thermophilus
guuuuuguacucucaagauuuaaguaacuguacaac

SEQ ID NO: 577 - RNA, 36 nt, Listeria innocua
guuuuagagcuauguuauuuugaaugcuaacaaaac

SEQ ID NO: 578 - RNA, 36 nt, Treponema denticola
guuugagaguuguguaauuuaagauggaucucaaac

SEQ ID NO: 579 - RNA, 36 nt, Neisseria meningitidis
guuguagcucccuuucucauuucgcagugcuacaau

SEQ ID NO: 580 - RNA, 36 nt, Streptococcus gordonii; identical to SEQ ID NO: 576

SEQ ID NO: 581 - RNA, 35 nt, Bifidobacterium bifidum
guuucaaugccugucagaucaaugacuuugaccac

SEQ ID NO: 582 - RNA, 36 nt, Lactobacillus salivarius
guuucagaaguauguuaaaucaauaagguuaagacc

SEQ ID NO: 583 - RNA, 37 nt, Francisella novicida
cuaacaguaguuuaccaaauaauucagcaacugaaac

SEQ ID NO: 584 - RNA, 37 nt, Francisella novicida; identical to SEQ ID NO: 583

SEQ ID NO: 585 - RNA, 37 nt, Legionella pneumophila
ccaauaaucccucaucuaaaaauccaaccacugaaac

SEQ ID NO: 586 - RNA, 36 nt, Nitratifractor salsuginis
guuuuaagaccccucaaaaccccacccuguuacaau

SEQ ID NO: 587 - RNA, 36 nt, Butyrivibrio fibrisolvens
guuuuaguacccgggaaaauuaagugauuggaaaac

SEQ ID NO: 588 - RNA, 36 nt, Streptobacillus moniliformis
gauacagauucuugguaaauuugaauaaugugaaug

SEQ ID NO: 589 - RNA, 36 nt, Mycoplasma mobile; identical to SEQ ID NO: 571

SEQ ID NO: 590 - RNA, 44 nt, Capnocytophaga ochracea
uguuaucaaucgcaaaacuacaaaauuugaaagcaauucacaac

SEQ ID NO: 591 - RNA, 36 nt, Acidovorax ebreus
aguguagcuauccggggugagagagggagcuacaac

SEQ ID NO: 592 - RNA, 36 nt, Wolinella succinogenes
auuauagcgaggaauggcugaguaggcggcuauaac

SEQ ID NO: 593 - RNA, 37 nt, Wolinella succinogenes
gcaacacuuuauagcaaauccgcuuagccugugaaac

SEQ ID NO: 594 - RNA, 37 nt, Wolinella succinogenes; identical to SEQ ID NO: 593

SEQ ID NO: 595 - RNA, 36 nt, Prevotella ruminicola
guugugguuugauguaggaaaggaaugauauacaac

SEQ ID NO: 596 - RNA, 48 nt, Fibrobacter succinogenes
guuguuauugcacuaguaaaacuagaaaaucugaaagcaauucacaac

SEQ ID NO: 597 - RNA, 36 nt, Campylobacter jejuni
auuuuaccauaaagaaauuuaaaaagggacuaaaac

SEQ ID NO: 598 - RNA, 36 nt, Campylobacter jejuni
guuuuagucccuuuuuaaauuucuuuaugguaaaau

SEQ ID NO: 599 - RNA, 36 nt, Pasteurella multocida
auuguagcacugcgaaaugagagagggaacuacaac

SEQ ID NO: 600 - RNA, 36 nt, Rhodopseudomonas palustris
agccuaccacggggaaaucgguagggaagccacggc

SEQ ID NO: 601 - RNA, 36 nt, Olsenella uli
guuuuggggcagugucguuuugacugguaaucaaac

SEQ ID NO: 602 - RNA, 36 nt, Rhodospirillum rubrum
acucuaccauggcggugugggacggggccauggaac

SEQ ID NO: 603 - RNA, 36 nt, Rhodospirillum rubrum; identical to SEQ ID NO: 602

SEQ ID NO: 604 - RNA, 36 nt, Dinoroseobacter shibae
aguuuagcuguucagaauucgggguccagccgcaac

SEQ ID NO: 605 - RNA, 36 nt, Verminephrobacter eiseniae
auuguagcucacugggauaugcgcacuggccggaac

SEQ ID NO: 606 - RNA, 37 nt, Francisella novicida; identical to SEQ ID NO: 572

SEQ ID NO: 607 - RNA, 37 nt, Francisella novicida; identical to SEQ ID NO: 572

SEQ ID NO: 608 - RNA, 37 nt, Wolinella succinogenes; identical to SEQ ID NO: 593

SEQ ID NO: 609 - RNA, 37 nt, Wolinella succinogenes; identical to SEQ ID NO: 593

SEQ ID NO: 610 - RNA, 37 nt, gamma proteobacterium
guuucagagcuuaucccaacaaaccaacagcugaaac

SEQ ID NO: 611 - RNA, 37 nt, gamma proteobacterium; identical to SEQ ID NO: 610

SEQ ID NO: 612 - RNA, 37 nt, Sutterella wadsworthensis
gcgaagaucauaacgcuacgagcuauagcacugaaac

SEQ ID NO: 613 - RNA, 37 nt, Sutterella wadsworthensis; identical to SEQ ID NO: 612

SEQ ID NO: 614 - RNA, 37 nt, Legionella pneumophila; identical to SEQ ID NO: 585

SEQ ID NO: 615 - RNA, 36 nt, Listeria innocua; identical to SEQ ID NO: 577

SEQ ID NO: 616 - RNA, 36 nt, Streptococcus thermophilus; identical to SEQ ID NO: 574

SEQ ID NO: 617 - RNA, 36 nt, Streptococcus mutans; identical to SEQ ID NO: 574

SEQ ID NO: 618 - RNA, 36 nt, Streptococcus pyogenes; identical to SEQ ID NO: 569

SEQ ID NO: 619 - RNA, 36 nt, Fusobacterium nucleatum
guuugagaguaauguuauuuuaaauagauucaaaac

SEQ ID NO: 620 - RNA, 36 nt, Filifactor alocis
guuugagaguaguguaauuucauaugguagucaaac

SEQ ID NO: 621 - RNA, 36 nt, Treponema denticola; identical to SEQ ID NO: 578

SEQ ID NO: 622 - RNA, 36 nt, Solobacterium moorei
guuugagaacuauguaaauuaugcugguagcaaaac

SEQ ID NO: 623 - RNA, 36 nt, Veillonella atypica
guuugcgaguaguguaauucuguaaaucucuaaaac

SEQ ID NO: 624 - RNA, 36 nt, Finegoldia magna
guuugagaaugauguaauuucauauagguauuaaac

SEQ ID NO: 625 - RNA, 36 nt, Olsenella uli; identical to SEQ ID NO: 601

SEQ ID NO: 626 - RNA, 36 nt, Lactobacillus rhamnosus
gucucagguagaugucagaucaaucaguucaagagc

SEQ ID NO: 627 - RNA, 36 nt, Lactobacillus gasseri
guuuuagaugguuguuagaucaauaagguuuagauc

SEQ ID NO: 628 - RNA, 36 nt, Lactobacillus gasseri; identical to SEQ ID NO: 627

SEQ ID NO: 629 - RNA, 36 nt, Oenococcus kitaharae
gcuucagaugugugucagaucaaugagguagaaccc

SEQ ID NO: 630 - RNA, 36 nt, Bifidobacterium bifidum
guuucagaugccugucagaucaaugacuuugaccac

SEQ ID NO: 631 - RNA, 36 nt, Staphylococcus pseudintermedius
guuuuagcacuauguuuauuuagaaagagguaaaac

SEQ ID NO: 632 - RNA, 36 nt, Eubacterium rectale
auuuuaguaacugaauaauuuacgugacuguaaaac

SEQ ID NO: 633 - RNA, 36 nt, Enterococcus faecalis
guuuuuguauucucaauaauuucuuaucaguaaaac

SEQ ID NO: 634 - RNA, 36 nt, Streptococcus thermophilus; identical to SEQ ID NO: 576

SEQ ID NO: 635 - RNA, 36 nt, Staphylococcus lugdunensis
guuuuaguacucuguaauuuuagguauaagugauac

SEQ ID NO: 636 - RNA, 36 nt, Eubacterium dolichum
guuuuguuaccauauggauuuuugcuagauuaagac

SEQ ID NO: 637 - RNA, 36 nt, Mycoplasma mobile; identical to SEQ ID NO: 571

SEQ ID NO: 638 - RNA, 36 nt, Mycoplasma ovipneumoniae
guuuuugugcuguacaauuucuuacuagaguaaaac

SEQ ID NO: 639 - RNA, 36 nt, Mycoplasma gallisepticum
guuuuagcacuguacaauacuuguguaagcaauaac

SEQ ID NO: 640 - RNA, 36 nt, Mycoplasma canis
guuuuaguguuguacaauauuuggguaaacaauaac

SEQ ID NO: 641 - RNA, 36 nt, Mycoplasma synoviae
guuuugggguuguacaauuauuuuguuaaguaaaac

SEQ ID NO: 642 - RNA, 36 nt, Aminomonas paucivorans
agcauagcauuucggagugcggcagggagcuaugac

SEQ ID NO: 643 - RNA, 36 nt, Clostridium perfringens
auuauagcauaucgagaauuuacuaggaacuauaac

SEQ ID NO: 644 - RNA, 36 nt, Clostridium cellulolyticum
auuauagcauaucggagccugaauuggagcuauaac

SEQ ID NO: 645 - RNA, 36 nt, Acidovorax ebreus; identical to SEQ ID NO: 591

SEQ ID NO: 646 - RNA, 36 nt, Neisseria meningitidis; identical to SEQ ID NO: 579

SEQ ID NO: 647 - RNA, 36 nt, Pasteurella multocida; identical to SEQ ID NO: 570

SEQ ID NO: 648 - RNA, 36 nt, phylotype Rs-D17
guuauaguuuccuuccucucucagaugugcuauaau

SEQ ID NO: 649 - RNA, 36 nt, Wolinella succinogenes; identical to SEQ ID NO: 592

SEQ ID NO: 650 - RNA, 36 nt, Campylobacter jejuni; identical to SEQ ID NO: 598

SEQ ID NO: 651 - RNA, 36 nt, Campylobacter jejuni; identical to SEQ ID NO: 598

SEQ ID NO: 652 - RNA, 36 nt, Helicobacter mustelae
auuuuagcauaaacauauuuaugaaguggcuaaaac

SEQ ID NO: 653 - RNA, 36 nt, Roseburia intestinalis
auuauaccauaccaagugauaacagggaauuacaac

SEQ ID NO: 654 - RNA, 36 nt, Lactobacillus coryniformis
gaucuauuuuagcugaaaacugaaggaaucaauagc

SEQ ID NO: 655 - RNA, 36 nt, Rhodopseudomonas palustris; identical to SEQ ID NO: 600

SEQ ID NO: 656 - RNA, 36 nt, Cand. Puniceispirillum marinum
aguauagcacucuggugauugagagccuagagcaac

SEQ ID NO: 657 - RNA, 36 nt, Verminephrobacter eiseniae; identical to SEQ ID NO: 605

SEQ ID NO: 658 - RNA, 36 nt, Ralstonia syzygii
agguuagcagaucgggaauugcgcucuggcuacaac

SEQ ID NO: 659 - RNA, 36 nt, Azospirillum B510
aguguagccgauggggaucggggguccagccgcaac

SEQ ID NO: 660 - RNA, 36 nt, Dinoroseobacter shibae; identical to SEQ ID NO: 604

SEQ ID NO: 661 - RNA, 36 nt, Rhodospirillum rubrum; identical to SEQ ID NO: 602

SEQ ID NO: 662 - RNA, 36 nt, Rhodospirillum rubrum; identical to SEQ ID NO: 602

SEQ ID NO: 663 - RNA, 36 nt, Spirochaeta Buddy
ggucaaucuuaacaaaaaucagcggucauccccaac

SEQ ID NO: 664 - RNA, 36 nt, Prevotella ruminicola; identical to SEQ ID NO: 595

SEQ ID NO: 665 - RNA, 36 nt, Flavobacterium columnare
guugugguuugauuaaagauuagaaaacacgauauu

SEQ ID NO: 666 - RNA, 36 nt, Parvibaculum lavamentivorans
agaguagcaaaucgagagacggccgcaauccgcagc

SEQ ID NO: 667 - RNA, 44 nt, Capnocytophaga ochracea; identical to SEQ ID NO: 590

SEQ ID NO: 668 - RNA, 48 nt, Fibrobacter succinogenes; identical to SEQ ID NO: 596

SEQ ID NO: 669 - RNA, 36 nt, Nitratifractor salsuginis; identical to SEQ ID NO: 586

SEQ ID NO: 670 - RNA, 36 nt, Akkermansia muciniphila
guuguacugugccuuauuuuggauucaaggcaaaac

SEQ ID NO: 671 - RNA, 44 nt, Artificial Sequence
  Synthetic sequence
guuuuagagcuagaaauagcaaguuaaaauaaggcuaguccguu

SEQ ID NO: 672 - RNA, 60 nt, Artificial Sequence
  Synthetic sequence
  misc_feature (13)..(17): n is a, c, g, or u
guuuuagagcuannnnnuagcaaguuaaaauaaguuaaaauaaggcuaguccguuaucaa

SEQ ID NO: 673 - RNA, 68 nt, Artificial Sequence
  Synthetic sequence
guuuuagagcuaugcugaaaagcauagcaaguuaaaaauaaguuaaaauaaggcuaguccguuaucaa

SEQ ID NO: 674 - RNA, 69 nt, Artificial Sequence
  Synthetic sequence
guuuuagagcuaugcuguuuuggaaacaaaacagcauagcaaguuaaaauaaggcuaguccguuaucaa

SEQ ID NO: 675 - RNA, 70 nt, Artificial Sequence
  Synthetic sequence
guuuuagagcuaguuuuagagcuagaaauagcaaguuaaaauuagcaaguuaaaauaaggcuaguccguu

SEQ ID NO: 676 - RNA, 70 nt, Artificial Sequence
  Synthetic sequence
guuuuagagcuauagcaaguuaaaaugaaaguuuuagagcuauagcaaguuaaaauaaggcuaguccguu

SEQ ID NO: 677 - RNA, 74 nt, Artificial Sequence
  Synthetic sequence
guuuuagagcuagaaauagcaaguuaaaauguuuuagagcuagaaauagcaaguuaaaauaaggcuaguccguu

SEQ ID NO: 678 - RNA, 119 nt, Artificial Sequence
  Synthetic sequence
guuuuagagcuaugcuguuuuggaaacaaaacagcauagcaaguuaaaauguuuuagagcuaugcuguuuuggaaacaaaacagcauagcaaguuaaaauaaggcuaguccguuaucaa

SEQ ID NO: 679 - RNA, 12 nt, Artificial Sequence
  Synthetic sequence
guuuuagagcua

SEQ ID NO: 680 - RNA, 218 nt, Artificial Sequence
  Synthetic sequence
  misc_feature (1)..(80): n is a, c, g, or u
  misc_feature (93)..(192): n is a, c, g, or u
nnnnnnnnnnnnnnnnnnnnnnnnnnnnnnnnnnnnnnnnnnnnnnnnnnnnnnnnnnnnnnnnnnnnnnnnnnnnnnnnguuuuagagcuannnnnnnnnnnnnnnnnnnnnnnnnnnnnnnnnnnnnnnnnnnnnnnnnnnnnnnnnnnnnnnnnnnnnnnnnnnnnnnnnnnnnnnnnnnnnnnnnnnnuagcaaguuaaaauaaggcuaguccg

SEQ ID NO: 681 - RNA, 219 nt, Artificial Sequence
  Synthetic sequence
  misc_feature (1)..(80): n is a, c, g, or u
  misc_feature (93)..(192): n is a, c, g, or u
nnnnnnnnnnnnnnnnnnnnnnnnnnnnnnnnnnnnnnnnnnnnnnnnnnnnnnnnnnnnnnnnnnnnnnnnnnnnnnnnguuuuagagcuannnnnnnnnnnnnnnnnnnnnnnnnnnnnnnnnnnnnnnnnnnnnnnnnnnnnnnnnnnnnnnnnnnnnnnnnnnnnnnnnnnnnnnnnnnnnnnnnnnnuagcaaguuaaaauaaggcuuuguccg

SEQ ID NO: 682 - RNA, 163 nt, Artificial Sequence
  Synthetic sequence
  misc_feature (1)..(80): n is a, c, g, or u
nnnnnnnnnnnnnnnnnnnnnnnnnnnnnnnnnnnnnnnnnnnnnnnnnnnnnnnnnnnnnnnnnnnnnnnnnnnnnnnnguuuuagagcuagaaauagcaaguuaaaauaaggcuaguccguuaucaacuugaaaaaguggcaccgagucggugcuuuuuuu

SEQ ID NO: 683 - RNA, 39 nt, Artificial Sequence
  Synthetic sequence
aucaacuugaaaaaguggcaccgagucggugcuuuuuuu

SEQ ID NO: 684 - RNA, 33 nt, Artificial Sequence
  Synthetic sequence
aaaaucaaaggaucuucuugagauccuuuuuuu

SEQ ID NO: 685 - RNA, 34 nt, Artificial Sequence
  Synthetic sequence
cgccgaaaaccccgcuucggcgggguuuugccgc

SEQ ID NO: 686 - RNA, 34 nt, Artificial Sequence
  Synthetic sequence
cgcaaaaaaccccgcuucggcgggguuuuuucgc

SEQ ID NO: 687 - RNA, 39 nt, Artificial Sequence
  Synthetic sequence
aaaaaaaaaccccgccccugacagggcgggguuuuuuuu

SEQ ID NO: 688 - RNA, 40 nt, Artificial Sequence
  Synthetic sequence
cgcaaaaaaccccgccccugacagggcgggguuuuuucgc

SEQ ID NO: 689 - RNA, 41 nt, Artificial Sequence
  Synthetic sequence
ucacacuggcucaccuucgggugggccuuucugcguuuaua

SEQ ID NO: 690 - RNA, 46 nt, Artificial Sequence
  Synthetic sequence
agagaauauaaaaagccagauuauuaauccggcuuuuuuauuauuu

SEQ ID NO: 691 - RNA, 80 nt, Artificial Sequence
  Synthetic sequence
ccaggcaucaaauaaaacgaaaggcucagucgaaagacugggccuuucguuuuaucuguuguuugucggugaacgcucuc

SEQ ID NO: 692 - RNA, 123 nt, Artificial Sequence
  Synthetic sequence
aucaaaauuuacggcuuugaaaaaguaauuucgugaccuucgguauaagguuacuacuagauucaggugcucaucagaugcaccacauucucuauaaaaaaaaaugguaucuuucuuauuuga

SEQ ID NO: 693 - RNA, 129 nt, Artificial Sequence
  Synthetic sequence
ccaggcaucaaauaaaacgaaaggcucagucgaaagacugggccuuucguuuuaucuguuguuugucggugaacgcucucuacuagagucacacuggcucaccuucgggugggccuuucugcguuuaua

SEQ ID NO: 694 - RNA, 129 nt, Artificial Sequence
  Synthetic sequence
gcaugugcucuguauguauauaaaacucuuguuuucuucuuuucucuaaauauucuuuccuuauacauuaggaccuuugcagcauaaauuacuauacuucuauuacuagagcccgccgccaccauggag

SEQ ID NO: 695 - RNA, 139 nt, Artificial Sequence
  Synthetic sequence
auuccgauaacuuguuuauugcagcuuauaaugguuacaaauaaagcaauagcaucacaaauuucacaaauaaagcauuuuuuucacugcauucuaguugugguuuguccaaacucaucaauguaucuuaucaugucug

SEQ ID NO: 696 - RNA, 225 nt, Artificial Sequence
  Synthetic sequence
uaauaagcgaauuucuuaugauuuaugauuuuuauuauuaaauaaguuauaaaaaaaauaaguguauacaaauuuuaaagugacucuuagguuuuaaaacgaaaauucuuauucuugaguaacucuuuccuguaggucagguugcuuucucagguauagcaugaggucgcucuuauugaccacaccucuaccggcaugccgagcaaaugccugcaaaucgcuccc

SEQ ID NO: 697 - RNA, 53 nt, Artificial Sequence
  Synthetic sequence
aacuuucaguuuagcggucuguuuuagagcuagaaauagcaaguuaaaauaag

SEQ ID NO: 698 - DNA, 31 bp, Artificial Sequence
  Synthetic sequence
aaggtacccagaccgctaaactgaaagttac

SEQ ID NO: 699 - DNA, 31 bp, Artificial Sequence
  Synthetic sequence
gtaactttcagtttagcggtctgggtacctt

SEQ ID NO: 700 - DNA, 40 bp, Artificial Sequence
  Synthetic sequence
agtttttaaaagagcttggcggttgttttagtcccttttt

SEQ ID NO: 701 - DNA, 42 bp, Artificial Sequence
  Synthetic sequence
caaagtttcattagttgaatttaactgttttagtcccttttt

SEQ ID NO: 702 - DNA, 42 bp, Artificial Sequence
  Synthetic sequence
aagaatgaggatgatgatattttacagttttagtcccttttt

SEQ ID NO: 703 - DNA, 42 bp, Artificial Sequence
  Synthetic sequence
gtgtgctaaaaaaaatggacttaaatgttttagtcccttttt

SEQ ID NO: 704 - DNA, 74 bp, Artificial Sequence
  Synthetic sequence
aagaaatttaaaaagggactaaaataaagagtttgcgggactctgcggggttacaatcccctaaaaccgctttt

SEQ ID NO: 705 - DNA, 54 bp, Artificial Sequence
  Synthetic sequence
ataactcgaccaatatttgacaaagtttcagttgctgaattatttggtaaacct

SEQ ID NO: 706 - DNA, 58 bp, Artificial Sequence
  Synthetic sequence
ggcaggttttgtatggtcatataggagtgtttcagttgctgaattatttggtaaacct

SEQ ID NO: 707 - DNA, 69 bp, Artificial Sequence
  Synthetic sequence
agctatagggttacctatcttttgagtgttggcaaataagtttcagttgctgaattatttggtaaacct

SEQ ID NO: 708 - DNA, 54 bp, Artificial Sequence
  Synthetic sequence
atgcttttaaactactgatatatacgtttcagttgctgaattatttggtaaact

SEQ ID NO: 709 - DNA, 80 bp, Artificial Sequence
  Synthetic sequence
gtaccaaataattaatgctctgtaatcatttaaaagtattttgaacggacctctgtttgacacgtctgaataactaaaaa

SEQ ID NO: 710 - DNA, 52 bp, Artificial Sequence
  Synthetic sequence
tatccattcccagccggaaattaagttgtagctccctttctcatttcgcagt

SEQ ID NO: 711 - DNA, 53 bp, Artificial Sequence
  Synthetic sequence
gcctttttacaagctcgctttctttgttgtagctccctttctcatttcgcagt

SEQ ID NO: 712 - DNA, 53 bp, Artificial Sequence
  Synthetic sequence
taaaggtttctgttgcgacccgaatgttgtagctccctttctcatttcgcagt

SEQ ID NO: 713 - DNA, 55 bp, Artificial Sequence
  Synthetic sequence
taactttgaccgtgtgcaatccagttagttgtagctccctttctcatttcgcagt

SEQ ID NO: 714 - DNA, 52 bp, Artificial Sequence
  Synthetic sequence
aacccactaaattttgcaaatgcggttgtagctccctttctcatttcgcagt

SEQ ID NO: 715 - DNA, 53 bp, Artificial Sequence
  Synthetic sequence
tttttttgtactgttgtttgaacgagttgtagctccctttctcatttcgcagt

SEQ ID NO: 716 - DNA, 55 bp, Artificial Sequence
  Synthetic sequence
ttcgtttcagatagcaaacgcagtagtgttgtagctccctttctcatttcgcagt

SEQ ID NO: 717 - DNA, 84 bp, Artificial Sequence
  Synthetic sequence
atatgacggtgggcaactggtacaggttgtagctccctttctcatttcgcagtgctacaatgccggatatgacggtgggcaact

SEQ ID NO: 718 - DNA, 52 bp, Artificial Sequence
  Synthetic sequence
cttttgtattgattcaaggtgcttgttgtagctccctttctcatttcgcagt

SEQ ID NO: 719 - DNA, 55 bp, Artificial Sequence
  Synthetic sequence
attcgtcgatgatggaaactcgagcatgttgtagctccctttctcatttcgcagt

SEQ ID NO: 720 - DNA, 55 bp, Artificial Sequence
  Synthetic sequence
tagccagtgctaaaaccgcacccgcttgttgtagctccctttctcatttcgcagt

SEQ ID NO: 721 - DNA, 54 bp, Artificial Sequence
  Synthetic sequence
atagaaatacatacgccgagtaattagttgtagctccctttctcatttcgcagt

SEQ ID NO: 722 - DNA, 54 bp, Artificial Sequence
  Synthetic sequence
tttttgtaattgttctgccttttttagttgtagctccctttctcatttcgcagt

SEQ ID NO: 723 - DNA, 53 bp, Artificial Sequence
  Synthetic sequence
acggcggaaaccattgccacaaaacgttgtagctccctttctcatttcgcagt

SEQ ID NO: 724 - DNA, 54 bp, Artificial Sequence
  Synthetic sequence
aataataacccaatacacgatgttaagttgtagctccctttctcatttcgcagt

SEQ ID NO: 725 - DNA, 171 bp, Artificial Sequence
  Synthetic sequence
ttgtcttatttatatacaaatagattattgacttatcatctcacaacggctagaatcccaaacatattgtcgcactgcgaaatgagaaccgttgctacaataaggccgtctgaaaagatgtgccgcaacgctctgccccttaaagcttctgctttaaggggcatcgtttat

SEQ ID NO: 726 - DNA, 35 bp, Artificial Sequence
  Synthetic sequence
ggtaactttgcctaggatagttttagagctatgtt

SEQ ID NO: 727 - DNA, 22 bp, Artificial Sequence
  Synthetic sequence
cattatgttttagagctatgtt

SEQ ID NO: 728 - DNA, 24 bp, Artificial Sequence
  Synthetic sequence
gagttttagagctatgttattttg

SEQ ID NO: 729 - DNA, 27 bp, Artificial Sequence
  Synthetic sequence
ttatagttttagagctatgttattttg

SEQ ID NO: 730 - DNA, 26 bp, Artificial Sequence
  Synthetic sequence
taaatgttttagagctatgttatttt

SEQ ID NO: 731 - DNA, 23 bp, Artificial Sequence
  Synthetic sequence
tacaagttttagagctatgttat

SEQ ID NO: 732 - DNA, 30 bp, Artificial Sequence
  Synthetic sequence
ttcatgttgttttagagctatgttattttg

SEQ ID NO: 733 - DNA, 28 bp, Artificial Sequence
  Synthetic sequence
gttttagagctatgctatttcgaatact

SEQ ID NO: 734 - DNA, 92 bp, Artificial Sequence
  Synthetic sequence
attgttagtattcaaaataacatagcaagttaaaataaggctttgtccgttatcaacttttaattaagtagcgctgtttcggcgcttttttt

SEQ ID NO: 735 - DNA, 43 bp, Artificial Sequence
  Synthetic sequence
gccattaattaatatggtgagttttagagctgtgttgtttcga

SEQ ID NO: 736 - DNA, 43 bp, Artificial Sequence
  Synthetic sequence
gctagcgcagttagtgctctgttttagagctgtgttgtttcga

SEQ ID NO: 737 - DNA, 43 bp, Artificial Sequence
  Synthetic sequence
tgttgtgtcatcatagttaggttttagagctgtgttgtttcga

SEQ ID NO: 738 - DNA, 43 bp, Artificial Sequence
  Synthetic sequence
caattagacaatagacaaacgttttagagctgtgttgtttcga

SEQ ID NO: 739 - DNA, 44 bp, Artificial Sequence
  Synthetic sequence
ttcggacatgacttgccacagttttagagctgtgttgttatcga

SEQ ID NO: 740 - DNA, 107 bp, Artificial Sequence
  Synthetic sequence
gttggaatcattcgaaacaacacagcaagttaaaataaggcagtgatttttaatccagtccgtacacaacttgaaaaagtgcgcaccgattcggtgcttttttattt

SEQ ID NO: 741 - RNA, 20 nt, Artificial Sequence
  Synthetic sequence
ugguccgcugccguucgcuu

SEQ ID NO: 742 - RNA, 20 nt, Artificial Sequence
  Synthetic sequence
gcagaaaaaaaccauggguu

SEQ ID NO: 743 - RNA, 20 nt, Artificial Sequence
  Synthetic sequence
aaaaaaccgguucagcugcc

SEQ ID NO: 744 - RNA, 20 nt, Artificial Sequence
  Synthetic sequence
aacuuucaguuuagcggucu

SEQ ID NO: 745 - RNA, 20 nt, Artificial Sequence
  Synthetic sequence
aggacaguuucagguagucc

SEQ ID NO: 746 - RNA, 20 nt, Artificial Sequence
  Synthetic sequence
aaccgguuuuuuagccaugu

SEQ ID NO: 747 - RNA, 20 nt, Artificial Sequence
  Synthetic sequence
uugacagcuagcucaguccu

SEQ ID NO: 748 - RNA, 20 nt, Artificial Sequence
  Synthetic sequence
cccggaagagagucaauuca

SEQ ID NO: 749 - RNA, 20 nt, Artificial Sequence
  Synthetic sequence
cccugaauugacucucuucc

SEQ ID NO: 750 - RNA, 20 nt, Artificial Sequence
  Synthetic sequence
gaauucauuaaagaggagaa

SEQ ID NO: 751 - RNA, 20 nt, Artificial Sequence
  Synthetic sequence
gaauggugcaaaaccuuucg

SEQ ID NO: 752 - DNA, 141 bp, Artificial Sequence
  Synthetic sequence
cgacaccatcgaatggtgcaaaacctttcgcggtatggcatgatagcgcccggaagagagtcaattcagggtggtgaatttgacagctagctcagtcctaggtataatagatctgaattcattaaagaggagaaaggtacc

SEQ ID NO: 753 - RNA, 20 nt, Artificial Sequence
  Synthetic sequence
aacuuucaguuuagcggucu

SEQ ID NO: 754 - RNA, 20 nt, Artificial Sequence
  Synthetic sequence
uggaaccguacuggaacugc

SEQ ID NO: 755 - RNA, 20 nt, Artificial Sequence
  Synthetic sequence
gguaguccgggaugucagcc

SEQ ID NO: 756 - RNA, 20 nt, Artificial Sequence
  Synthetic sequence
aggacaguuucagguagucc

SEQ ID NO: 757 - RNA, 20 nt, Artificial Sequence
  Synthetic sequence
gucuugcagggaggaguccu

SEQ ID NO: 758 - RNA, 20 nt, Artificial Sequence
  Synthetic sequence
gcauaaccggaccgucggac

SEQ ID NO: 759 - RNA, 20 nt, Artificial Sequence
  Synthetic sequence
cuuucagagcaccgucuucc

SEQ ID NO: 760 - RNA, 20 nt, Artificial Sequence
  Synthetic sequence
gaugguguagucuucguugu

SEQ ID NO: 761 - RNA, 20 nt, Artificial Sequence
  Synthetic sequence
caucuaauucaacaagaauu

SEQ ID NO: 762 - RNA, 20 nt, Artificial Sequence
  Synthetic sequence
caucuaauucaacaagaauu

SEQ ID NO: 763 - RNA, 20 nt, Artificial Sequence
  Synthetic sequence
aguagugcaaauaaauuuaa

SEQ ID NO: 764 - RNA, 20 nt, Artificial Sequence
  Synthetic sequence
acaaguguuggccacggaac

SEQ ID NO: 765 - RNA, 20 nt, Artificial Sequence
  Synthetic sequence
uuucaugugauccggauaac

SEQ ID NO: 766 - RNA, 20 nt, Artificial Sequence
  Synthetic sequence
cguuccuguacauaaccuuc

SEQ ID NO: 767 - RNA, 20 nt, Artificial Sequence
  Synthetic sequence
uaacucgauacgauuaacaa

SEQ ID NO: 768 - RNA, 20 nt, Artificial Sequence
  Synthetic sequence
auaauggucugcuaguugaa

SEQ ID NO: 769 - RNA, 20 nt, Artificial Sequence
  Synthetic sequence
auguggucacgcuuuucguu

SEQ ID NO: 770 - RNA, 20 nt, Artificial Sequence
  Synthetic sequence
aacuuucaguuuagcggucu

SEQ ID NO: 771 - RNA, 20 nt, Artificial Sequence
  Synthetic sequence
uggaaccguacuggaacugc

SEQ ID NO: 772 - RNA, 20 nt, Artificial Sequence
  Synthetic sequence
gaugguguagucuucguugu

SEQ ID NO: 773 - RNA, 20 nt, Artificial Sequence
  Synthetic sequence
uuccggguacauacguucgg

SEQ ID NO: 774 - RNA, 20 nt, Artificial Sequence
  Synthetic sequence
gguaguccgggaugucagcc

SEQ ID NO: 775 - RNA, 20 nt, Artificial Sequence
  Synthetic sequence
aggacaguuucagguagucc

SEQ ID NO: 776 - RNA, 20 nt, Artificial Sequence
  Synthetic sequence
uugacagcuagcucaguccu

SEQ ID NO: 777 - RNA, 20 nt, Artificial Sequence
  Synthetic sequence
aaccgguuuuuuagccaugu

SEQ ID NO: 778 - RNA, 20 nt, Artificial Sequence
  Synthetic sequence
aaaaaaccgguucagcugcc

SEQ ID NO: 779 - RNA, 20 nt, Artificial Sequence
  Synthetic sequence
uugggaagggcgaucggugc

SEQ ID NO: 780 - RNA, 20 nt, Artificial Sequence
  Synthetic sequence
gcuggccugguucaccacgc

SEQ ID NO: 781 - RNA, 20 nt, Artificial Sequence
  Synthetic sequence
guagccaaaucgggaaaaac

SEQ ID NO: 782 - RNA, 20 nt, Artificial Sequence
  Synthetic sequence
cgguaagccuucgcacauau

SEQ ID NO: 783 - RNA, 20 nt, Artificial Sequence
  Synthetic sequence
acaagaaccauucgagaguc

SEQ ID NO: 784 - RNA, 20 nt, Artificial Sequence
  Synthetic sequence
gucaagcagcaguauaugcu

SEQ ID NO: 785 - RNA, 20 nt, Artificial Sequence
  Synthetic sequence
ugugaguuagcucacucauu

SEQ ID NO: 786 - RNA, 20 nt, Artificial Sequence
  Synthetic sequence
auguuguguggaauugugag

SEQ ID NO: 787 - RNA, 20 nt, Artificial Sequence
  Synthetic sequence
cuuccggcucguauguugug

SEQ ID NO: 788 - RNA, 20 nt, Artificial Sequence
  Synthetic sequence
gggcgaggagcuguucaccg

SEQ ID NO: 789 - RNA, 20 nt, Artificial Sequence
  Synthetic sequence
ggccacaaguucagcguguc

SEQ ID NO: 790 - RNA, 20 nt, Artificial Sequence
  Synthetic sequence
gcccuugcucaccaugguug

SEQ ID NO: 791 - RNA, 20 nt, Artificial Sequence
  Synthetic sequence
gaccaggaugggcaccaccc

SEQ ID NO: 792 - RNA, 20 nt, Artificial Sequence
  Synthetic sequence
gguggugcagaugaacuuca

SEQ ID NO: 793 - RNA, 20 nt, Artificial Sequence
  Synthetic sequence
guggucacgagggugggcca

SEQ ID NO: 794 - RNA, 20 nt, Artificial Sequence
  Synthetic sequence
gcacggggccgucgccgaug

SEQ ID NO: 795 - protein, 240 aa, Acetobacter aceti
MANIAENLVFGIDLGIGSCGWAVLNQKAKDENIVALGSWCFDVPETDKERIPTNQIRRANRLLRRVIRRRRNRMAEIRRLFASKGMLDTADPDALAKISADPWEMRAKGLDYQLTPQEFAVALGHIAKRRGFKSAAKRVSTNAPSEDSKMLAALEKTKEQSAQYRTIGEMFARDPAYADRRRNRDGCFDRTMSREDLFKETQILFESQRRLGNFSATSETEQAFIDIAFRQKPMQDSERL

SEQ ID NO: 796 - protein, 400 aa, Acetobacter aceti
SFERFRLLCRLVNLRVTDGLEDRPLTPEELRLACEDAGKTRKLSVKKVRSLIGLRDDQRFTTIPPDQEQHDIAARTGDALTGTATFRAILGESFWRQLLPHPEQLDRAAWIISFHELTDTIISKLATIGLPSEVMELIRKALEDGKFSKFKGAASLSDKAARKLIPFLQEGLTYDKACQKAGYNHAASKFTHYDSIDTKAKFNSLMDDVRDSITNPVARKAISEGMKQVWAMRNQWGLPGAICIELARDVGNSAEKRREIESGIKKNTAQRERERQEAKEHLNQSDISSETLLRYRLWKEQGGRCCYTDQPITPSQLIASDNSVQVDHILPWSRFGDDSYLNKALCTAKANQEKKNRTPWEWIHNQKGVEAWNHFTAAVESRKETRGLKKRNFLLKSSKE

SEQ ID NO: 797 - protein, 376 aa, Acetobacter aceti
YAARVMAEAVRLLYPSGNRAEKGGVKRVFTRPGALTAALRHAWGVESLKKINGKRLNDDRHHALDAAVVAAVSEKEIQKLTKSFQICEQKGLARPMRDVPMPWEGFRHQLETAYADIRVARPERRRARGKGHDATIRQLREEKDGPVVYERRAISDLKLTDLERIKDPERNSAIISSLRTWIEKGKPADYPPQSPKGDEIRKIRVMSRNKPAVSVRGGTADRGEMTRVDVFTKMGKKGKPEWFLVPIYRHQVIDRIQWPQPPNQAAANGKSEKNWPTMGLEHEFRFSLYPRSYVQIVKRDGEIIEGYFAGLDRTVAAFSLLSSSDPTSIQRGIGAKTLESIRKYNVNRFGDISMVEQETRTWHGDVCISPDQPDSA

SEQ ID NO: 798 - protein, 1054 aa, Actinobacillus suis
MKLTPLNYILGLDLGIASVGWAVVEIDEQENPLGLIDVGVRTFDRAEVPKTGESLALARRLARSARRLVKRRADRIKKAKRLLKAENILLSADEHLPNDVWQLRVKGLDQKLERQEWAAVLLHLLKHRGYLSQRKNESKSENKELGALLSGVETNHQILQSAEYRTPAEIAVKKFHVEDGHIRNQRGAYTHTFSRLDLLAEMELLFQRQTDLGNPHTSAKLLENLTALLMWQKPALAGEAILKMLGKCTFEPTEYKAAKNSYSAERFVWLTKLNNLRILEQGAERALTDNERFALLDQPYEKAKFTYAQARTMLALPDEAIFKGVRYQGEDKKAVETKTILMEMKAYHQIRKALENADLKAEWNELKNNSELLDDIGTAFSLHKTDEDICRYLDGKLSESILNALLENLNFDKFIQLSLKALQQILPLMLQGQRYDEAVSAIYGDHYGKKSAEINRLLPTIPADEIRNPVVLRTLTQARKVINAVVRLYGSPARIHIETGREVGKSYQDRKKLEKQQEDNRKQRESAVKKFKEYFPNFVGEPKGKDILKMRLYELQQAKCLYSGKSLELHRLLEKGYVEVDHALPFSRTWDDSFNNKVLVLANENQNKGNLTPYEWLDGKNNSEHWQNFVARVQTSGFSHTKKQRILSHKLDEKGFIERNLNDTRYVARFLCNFIADNMLLTGKGKRKVFASNGQITALLRGRWGLQKVRDDNDRHHALDAVVVACSTVVMQQKITRFVRYEEGNVFSGERIDRETGEIIPLHFPSPWAFFRENVEIRIFSENPKLELENRLPDYPQYNHEFVQPLFVSRMPTRKMTGQGHMETVKSAKRLDEGLSVLKVPLTQLKLSDLERMVNREREVTLYESLKARLEQFGNDPAKAFAEPFHKKGGAVVKAVRVEQTQKSGVLVRDGNGVADNASMVRVDVFTKGGKYFLVPIYTWQVAKGILPNKAVTANVDEIDWLEMDESYQFIFTMYPNDLVKVKLKKEEFFGYYGGLDRATGAIVIKEHDLEKSKGKQGIYRIGVKLALSFEKYQVDELGKNIRPCRPTKRQHVR

SEQ ID NO: 799 - protein, 239 aa, Actinobacillus ureae
MEIRIFSENPKLGLENRLPGYPQYNHEFVQPLFVSRMPTRKMTGKGHMETVKSAKRLDEGLSVLKVPLTQLKLSDLERMVNREREDALYQSLKAHLEQFGNDPAKAFAEPFHKKGGTVVKAVRVEQTQKSGVLVRDGNGVADNTSMVRVDVFTKAGKYFLVPIYKWQVAKRILPNKAVTAGVDEIDWLEMDSSYQFIFTMYANDLVKVKLKKRSILGLLRWFRSCNWGYCYQRTRFREI

SEQ ID NO: 800 - protein, 400 aa, Actinobacillus ureae
MKLTPLNYILGLDLGIASVGWAVVEIDEQENPLGLIDVGVRTFDRAEVAKTGESLALARRLARSSRRLVKRRADRIKKAKRLLKAENLLLSADEILPNDVWQLRVKGLDQKLERQEWAAVLLHILKHRGYLSQRKNESKSENKELGALLSGVATNHQLLQTAEYRTPAEITVKKFQAEENGHGHIRNQRGDYSHTFDRKDLLAEMKLLFQRQAELGNPHTSEKLLENLTTLLLWQKPALAGEAILKMLGKCTFEPAEYKAAKNSYSAERFVWLTKLNNLRILENGIERALTDNERFTLLDQPYEKAKLTYAQARTMLALSDEAIFKGVRYQGEDKKAAEKVALIEMKGYQHIRKALEGAGLKAEWNELKNNSELLDDIGTAFSLYFSISNLPTEIAYFTP

SEQ ID NO: 801 - protein, 1113 aa, Actinomyces georgiae
MSASSQNVERIRYKVGIDVGLRSIGFCAVQVDADDRPVKLLNTVVHVHDAGVSPADAKKADTRKLVSGVARRTRRLYRTRKRRLVDLDRQLDGLGWPLVDPARFADPREPWFAREKLVSGRVDDADERKELLSVALRHIAHHRGWRNPYSTVESLQADAPPSEFLQGLNQRVSEKLGTELDPGLTQGQLVAKLLHRFPNAKIRGPEGILRGKLHQSDNAGELRLICRTQGLDCHITEELVRLVFQAKSPKANKEMRKRIGRDQLPGQGAHIRAEKAHPVFQRFRIVAVLANLRIREAHVDRRLTAEEMRTLTDFLLGLAGSEQPTWEELADNLNIERHQLRGTAKASVDGAPALRFPPIDATTDRIYASKLKWLAEWWRQADEERRGYMVDALSNSGGSEDEPYLDDEIAEMLEQASEEDQAKLDSLHLPGGRASYCLDTLRRLTDAMLGGGLDLFEARKAVFHVDDDWAPPTDPIGAPVGNPPVDRVLKHVARWLEAATGRWGAPQTINIEHVREGLGSEKAARELTRMNDRRRRNNQKLVEEMGEKLGMSGRIRRSDRMRYEAIRRQNCECLYCGQPITYQTMEMDHIVPRAGAASTNSRSNLAAVCRRCNHQKGKLPFAVWAESQDSPAEVRLQDAVQRVRHWLRDAGMGQKELQALRVQVIARLKSKRPDEEFDGRSMESIAWMANELRARVEAQYRGSGTTVRVYRGALTAEARKASGFEGRVNLIGGRGKDRFDRRHHAMDALVIALMNQSVAQTLALRLNMRDSQWLTQSEQTWRQFHGAPGEAARKWEAWDRDMRDASDLFNLALDGGRIPITENVRLRVGNGRVHEDGVIRFKPEYEVKGKTIKGGEARLLGDSLPSEQIDRAETPALWTALTRLPEYDRKSGLPENPDRVIRVNGAVVQATDRIRFFGTPASVAVRGGYAKLGESIHHARIYRINGKTPKYAMIRVYTIDLMRLNHEDIFTAVLKPSTISMRCAEKKLKYAIAEGNAEQIGWLVEGDQLELDAAAYAKGVGADLMREYPMATCWRVAGFPDEAKLRLRPVLLAAEGMGEDAPKFMREVLENQGWRPAVNALLSPGSVRVVRRNVLGEPRFKSSGHLPTTVDLV

SEQ ID NO: 802 - protein, 1101 aa, Actinomyces naeslundii
MWYASLMSAHHLRVGIDVGTHSVGLATLRVDDHGTPIELLSALSHIHDSGVGKEGKKDHDTRKKLSGIARRARRLLHHRRTQLQQLDEVLRDLGFPIPTPGEFLDLNEQTDPYRVWRVRARLVEEKLPEELRGPAISMAVRHIARHRGWRNPYSKVESLLSPAEESPFMKALRERILATTGEVLDDGITPGQAMAQVALTHNISMRGPEGILGKLHQSDNANEIRKICARQGVSPDVCKQLLRAVFKADSPRGSAVSRVAPDPLPGQGSFRRAPKCDPEFQRFRIISIVANLRISETKGENRPLTADERRHVVTFLTEDSQADLTWVDVAEKLGVHRRDLRGTAVHTDDGERSAARPPIDATDRIMRQTKISSLKTWWEEADSEQRGAMIRYLYEDPTDSECAEIIAELPEEDQAKLDSLHLPAGRAAYSRESLTALSDHMLATTDDLHEARKRLFGVDDSWAPPAEAINAPVGNPSVDRTLKIVGRYLSAVESMWGTPEVIHVEHVRDGFTSERMADERDKANRRRYNDNQEAMKKIQRDYGKEGYISRGDIVRLDALELQGCACLYCGTTIGYHTCQLDHIVPQAGPGSNNRRGNLVAVCERCNRSKSNTPFAVWAQKCGIPHVGVKEAIGRVRGWRKQTPNTSSEDLTRLKKEVIARLRRTQEDPEIDERSMESVAWMANELHHRIAAAYPETTVMVYRGSITAAARKAAGIDSRINLIGEKGRKDRIDRRHHAVDASVVALMEASVAKTLAERSSLRGEQRLTGKEQTWKQYTGSTVGAREHFEMWRGHMLHLTELFNERLAEDKVYVTQNIRLRLSDGNAHTVNPSKLVSHRLGDGLTVQQIDRACTPALWCALTREKDFDEKNGLPAREDRAIRVHGHEIKSSDYIQVFSKRKKTDSDRDETPFGAIAVRGGFVEIGPSIHHARIYRVEGKKPVYAMLRVFTHDLLSQRHGDLFSAVIPPQSISMRCAEPKLRKAITTGNATYLGWVVVGDELEINVDSFTKYAIGRFLEDFPNTTRWRICGYDTNSKLTLKPIVLAAEGLENPSSAVNEIVELKGWRVAINVLTKVHPTVVRRDALGRPRYSSRSNLPTSWTIE

SEQ ID NO: 803 - protein, 1181 aa, Actinomyces sp.
MLHCIAVIRVPPSEEPGFFETHADSCALCHHGCMTYAANDKAIRYRVGIDVGLRSIGFCAVEVDDEDHPIRILNSVVHVHDAGTGGPGETESLRKRSGVAARARRRGRAEKQRLKKLDVLLEELGWGVSSNELLDSHAPWHIRKRLVSEYIEDETERRQCLSVAMAHIARHRGWRNSFSKVDTLLLEQAPSDRMQGLKERVEDRTGLQFSEEVTQGELVATLLEHDGDVTIRGFVRKGGKATKVHGVLEGKYMQSDLVAELRQICRTQRVSETTFEKLVLSIFHSKEPAPSAARQRERVGLDELQLALDPAAKQPRAERAHPAFQKFKVVATLANMRIREQSAGERSLTSEELNRVARYLLNHTESESPTWDDVARKLEVPRHRLRGSSRASLETGGGLTYPPVDDTTVRVMSAEVDWLADWWDCANDESRGHMIDAISNGCGSEPDDVEDEEVNELISSATAEDMLKLELLAKKLPSGRVAYSLKTLREVTAAILETGDDLSQAITRLYGVDPGWVPTPAPIEAPVGNPSVDRVLKQVARWLKFASKRWGVPQTVNIEHTREGLKSASLLEEERERWERFEARREIRQKEMYKRLGISGPFRRSDQVRYEILDLQDCACLYCGNEINFQTFEVDHIIPRVDASSDSRRTNLAAVCHSCNSAKGGLAFGQWVKRGDCPSGVSLENAIKRVRSWSKDRLGLTEKAMGKRKSEVISRLKTEMPYEEFDGRSMESVAWMAIELKKRIEGYFNSDRPEGCAAVQVNAYSGRLTACARRAAHVDKRVRLIRLKGDDGHHKNRFDRRNHAMDALVIALMTPAIARTIAVREDRREAQQLTRAFESWKNFLGSEERMQDRWESWIGDVEYACDRLNELIDADKIPVTENLRLRNSGKLHADQPESLKKARRGSKRPRPQRYVLGDALPADVINRVTDPGLWTALVRAPGFDSQLGLPADLNRGLKLRGKRISADFPIDYFPTDSPALAVQGGYVGLEFHHARLYRIIGPKEKVKYALLRVCAIDLCGIDCDDLFEVELKPSSISMRTADAKLKEAMGNGSAKQIGWLVLGDEIQIDPTKFPKQSIGKFLKECGPVSSWRVSALDTPSKITLKPRLLSNEPLLKTSRVGGHESDLVVAECVEKIMKKTGWVVEINALCQSGLIRVIRRNALGEVRTSPKSGLPISLNLR

SEQ ID NO: 804 - protein, 1120 aa, Actinomyces sp.
MNAMKQYNAGIDVGINSVGFAAIEVDSKGLPLNILNNMVVLHDSGVDPGTAKTGATRLANSGTARRTRKLIARRRKRLQKLDRYIEVQGWPLVDFSSLPDPYTPWKIRAKLTQDRLEGEEQGRGLSIALRHMARHRGWRNPYEGVESLHSPKEASKQFKDLKDRVTKVSGVIFDEDATPAEVVCDIGLSPKQRLRSAPSAKYKEGATLADEPVGGKSKEGLLGGKLMQSDNANELRKIGIVQGLSNEKVNEIIDQVFASESPKGQAGKRAKKDELPGQEQYVRALRAHLAFQRFRIVAAVANLRILEAEPKHERLLSQSEKDKVIEFLMSADGDDGVTWSDVAEELGIERECLSGTAKRGADGERPSSFPPTNSTNISIVRSKVKPLIEWWRKASDDEQATLVTALSNADELTDDQPSAETVRQFLSSPDEQSQEKIDKISLPKGRAAYSVNSLERLTRRMLKDSVDLFEARKREFGVDNNWTPTPDSIGEPVGNPAVDRVLKIVNRWLLAVTRKWGPPKVVNIEHVRVGFTSAAQTRKYEEENKTNRERNLAILEELRDKFGTSGKIRREDITRFAALRRQNCQCAYCGEAITFFDCEMDHIVPRKGPGSTNTRNNLVAICERCNKSKSNMPFSLWAQNCDIPGVSVEAVIDRVRTWIKDPELNPKQYNNFKKDVIERLRKTVDDDAIDNRSIESVAWMATELADRIGSHFRTAGANTKVRVYRGWLTSEARKASGFEGKINLIGGRGKTRLDRRHHAMDAATIALMRQSVAQTLVERASIRESDRLRRVVSSSWKDYRGADRDKQFSYGSWLNSMNALAELFNRAIDADGIPVTQNLRLRLGNGEAHDATIRSLEKKRVGASWTIGEIDRASTPQLWLALTRQEDFDQNDGLPANASRELRVKNHWFHAEENVTLFPTKSAAIAVRGGYAEIGNTIHHARLYKLPGKKLTYGMIRVFAIDLLCAWHTDLFSSPLLPESISLRTAETKVRRAVEDGAAMYIGWLVDGDEIVLDPETKAFKSNKIGEYLCEFPGTKRWKVDGFPDKEKLRLRPLQLAGEGLPEDVSAGTEEILGPKGNGWRVAINALFKSSQLVVVRRTALGMVRKLSRRHLPLTTRLRG

SEQ ID NO: 805 - protein, 1095 aa, Actinomyces sp.
MPAHHLRVGIDVGTHSVGLATLRVDDQGTPIELLSALSHIHDSGIGKEGQKDHDTRKKLSGVARRTRHLLRNRRERLQQLDKVLVDLGFPIPKPEEYPDLSERTDPYRVWRVRARLVEETLPEELRGPAISMAVRHIARHRGWRNPYSKVESLLSPAEESSFMKALRKRIMTKTGEVLDDDITPGQAMAQVALTHKIYMRGPEGILGKLHQSDNANEIRKICARQGISSDVCKQLLRAVFKAESPRGSAVSRVAPDPLPGQGSFRRAPKCDPEFQRFRIISIVANLRISETKGENRPLTVDERRQVVAFLMEDSQADLTWVDVAEKLRVSRQALRGTAMLTADGERSAAQPPIDVTDQIMRKTKISALKTWWDKADAERRGAMVRYLYEGLEDSECAEVIAKLPEKDHAKLDSLHLPAGRAAYSRESLTALSDHMLETTNDLHEARKRLFGVDDSWAPPAEPVGAPVGNPSVDRTLKIVARYLSAVESIWGTPEVIHVEHVRDGFTSERTAEERDKANRSRHNDNQKAIEKIQHDYGKEGYISRGDIVRFHALKLQGSACLYCGTTIGYHTCQLDHIVPQAGPGSNNRRGNLVAVCERCNHSKSNTPFAVWAQKCGIPHVGVKEAISRVNGWVEHNHSTSSGDLTRLKKEVIARLRRTQKDPEIDERSMESVAWMANELHHRIAAAYPETTVMVYRGSITAAARKAASIESRINLIGEKGRKDRLDRRHHAVDASVVALMEPSVAKTLAERSSLRGEQRLTGQEQTWKQYTGLTVGARERFEAWRGHMHRLTELFNESLAADEVYVTQNIRLRLSDGSAHTVKASKLVSHRLGDGLTVQQIDRACTPALWCALTREIDFDEKNGLPAREDRVIRVHGQEISSADCIQVFSKRKKTKSDRDEAPFGAIAVRGGFVEIGSSIHHARIYRIEGEKPAYAMLRVFTHDLLSQRHGDLFSAVIPPQSISMRCAATELRQAISEGRATYLGWIVSGDELHIPVETFTTHKIGSFLKDYPNTTRWRICGYDSETMLILKPRILSAEGLNNSSDIAEYVIKNKGWRVAINKLAKVHPTVVRRDALGRPRHSSRSNLPVTWSIE

SEQ ID NO: 806 - protein, 1144 aa, Actinomyces sp.
MSMIDSSENVPGIRYRVGIDVGLKSIGFCAVEVDRNDQPVRMLNSMVFIHDAGVDPNENKAAKSRKLTAGVARRTRRLYRTRHQRLVNLDRVLSKEFGWPLPDLTSFKDPREPWHVRAGLLEGYIADDEKRKEALSIALRHIARHRGWRNPYAKVETLLQPSEPSDFLKGLNDRISEELGRAFPADATPGQLVDTYLAHPDYVGRAGTPKLRGPQGILAGKLHQSDNAQEIRGICDVQRIEPAERDRLIRVVFEAKSPKGSAKERGLVGYDELPGQGRHVRAEKAHPAFQLFRMVSVLANLRIREGREERPLTPDELEDLVDFINQVSLKQEVTWQDLADKLRIERADLRGTAKASFDGSPVLRNPPTDVTTEKIMACKVKWLKEWWKEADDEQRGYMVDAFSNSGGSEDGTDVNDEVAELLEQATEDDQLEFEKISLPQGRAAYSLDSLRRLTDRMLRDGVDLHTARRLEFNVGDDWKPAVEPIGAPTGNPAVDRVLKQVSRWLHAATERWGEPTVINIEHARDGLGSERVARELMRENEKRRKANASAVAEMAAKLKLSGKVHRSDQIRYFALQRQNCQCLYCGAPITYTTAEMDHIVPRADGSSTNDRSNLAAVCRTCNHMKGKIPFAVWASSDKANQGVSLTGALERVNMWQRDSGMSPRQLKQLQREVCARLKSKKPDQEFDGRSMESVAWMAVELRTRIEGFYRSRDEESVPSVGVYRGQLTAEARRASGFESRVNLIGGRGKTRFDRRHHAMDALVIALMNPSVSRTLALRLNMRDAQRLTGVEETWKHFYGKPGEASKRFESWRESMLRGVELFNIALSDNAIPFVENIRLRVGSSVIHDATVHSFCPPKTPDGKQIITKGYGEQHSLGSAMPVELIDRAETPALWTALTRCPDFDPKKGLPENPQRTISVNGTRVGPTELVNFFEFSKSGPKACLKVRGGYVDLSGAIHHARIYRIAGKKTAYAMIRVFQVDLLRLKDHDVFTTPLKPSTISMRTAEPKIREALANGTATQIGWLVEGDELVIDTSKYSGGFIGEVLARYPEATSWRVAGFMTPAKLRIKPILLSKEGFVDETQAALLGVEVTSEAIQKTVDRPGWLPAVNVLFGAGGVRVIRRNCLGEERYHSSASLPVSMTLE

SEQ ID NO: 807 - protein, 1103 aa, Actinomyces sp.
MTKINDDLRYRVGIDVGLKSIGFCAVEVDENDQPLRLLNSMVFVHDAGVDPNENKAAKSRKLTAGVARRTQRGTAQNRRRLAELDRALSEELNWPLPNLEDFEDSYEPWHTRAELVEHYIKDDAERAEALAIAIRHIARHRGWRNPYLSVDSLLTPQEPSKFLRGLNERVTQALGREFPADATPGQLICAYIDSPKYAETQGIRGDSGILSGKLHQFDNVGEIRKICEVQRLDHDVFKLLVRKVFFAKSPRGSAAGLVGHDQIPGQGKYIRAEKAHPDFQLFRIVAVLTNLRIREGKAERCLTPDELRGLVDYILEVQLKQQVTWADLADNLGIERTDLRGTARASFDGSPALRFPPTDVTAEKIMASKVKWLKDWWDKADSERRGFMVDALSNSGGSTGDNDIDDEVAALLEAATEDEQAELEKIQLPQGRAAYSLDSLRRLTKRMLEEGVDLHTARKEEFNVDDDWRPEPEPIEAPVGNPAVDRVLKQVARWLNMATDRWGVPDVINIEHTRDGLGSEKVARELLRESQKRQDLNQKDMDKMIRELGISGKARRSSLIKYQAIQRQNSMCLYCGTEIGFETAEMDHIVPRALSGSTNDRSNLAAVCRACNHQKGAVPFAVWATSGEAHAGVSLEDAIKRVRLWQKGPGMSPKQHKAFQNEVISRLKSRKPDEEFDGRSMESVAWMAVELRTRIDGYYRKVNSDSVPKVGIYRGQLTAEARKASGFENRVNLIGGKGKTRFDRRHHAMDALVIAMMNQSVSQTLALRVNMRESQRITGQEETWKNFYGKPGQASERFEKWREGMLRAVELFNIELAKNAIPFHENVRLRVGSSKVHDDTVRKFIHAKLGEALSVAMIDCAETPALWTALTRLPDFDPKDGLPEDLSREIYIHSRKITADEQLNFFNSPSACLKVRGGYVEIGSSIHHARVYRIDGKKTTYSMVRVFATDLVKMTHEDVFTTPLKPSTISMRTADPKIRKALADGTATQIGWLVEGDELQLETDKYSGGLIGEVLAEYPQLTSWRVAGFYGVTQLRLRPYMLAAEGIPSDASESLRKVIEGKGWLPAINALLSSGCVKVVRRNCLGEPRFNAKSSLPVSQLLR

SEQ ID NO: 808 - protein, 1114 aa, Actinomyces turicensis
MQFHFYMVYVTMKGMNDKDASQQLRYRVGIDVGTHSIGFCAVEVDESGMPIQLLNSMVHKHDSGIDPGGNDTATTRLAEAGVARRTRRLIRRRKKRLQELDAFIEECGWPLVDLATITDARSPWRIRAHLATEHIDDEAEQGKLLSIALRHMARHRGWRSPYARISSLHIQADPSEQLKALAQRVSEKTGISLTADQTPAQLISVYLDVFETGKLRGPEGILGGKLMQSDNANELRRIATVQGLDNDLLKKIIGFVFAAESPKGSAAKRVGKDVLPGAHGLRAEKAHPAFQQFRIVSIVQNLRIKEGTGLRALTSEETEIVVDFLNQAGLTEAPTWEEVADNLEIPRSHLKGTATEGFDGIAPSTRPPFDVTSQKILNGKLKKLSAWWKDADYDHRCAMVNALSNVGSDDEGSLADDDVREFLSDFTDEELEALDKVELPGGRAAYSVDSLEKLTNTMLSEGCDLHSARKIAFGVDDSWTPPAEPIGQPVGNPAVDRVLKQVARWISAATNQWGTPESVNIEHVRDALGSEKASREYQRSLQTRRIRNEKLFAEMRERLDIGGKPRRSELTRYLALQRQNCQCLYCGMPITYTDAEMDHIVPRKGAASTNTRENFAAVCRACNHQKSNLPFAVWAEKTERPGVSVKEAYKRVSDMRIEPGMNGRQMNEFRKAIRLRLTTKHADAEIDGRSLESVAWMANELRHRIEGFYRSAENDVTVRVFRGAVTAEGRRASGFESRVNLIGGKGKTRLDRRHHAMDALTIALMEPGIAQTIALRMNMRESQRVLGEQETWKSFTGGSDTARKRWEHWCEEMLRASELFNVFLAEDRIPICQNKRLRLGSSAVHKAIVQPFEASDKRIVSDAMPVELIDRASTPALWTALTRDPDFDPKEGLPANPSRTIRLHDKRLGPNETVEFFPTAAACLAIRGGYCEIGAGIHHARIFRISGKKTTYAMLRVYQCDLVRFQKENLLTVELPANTISVRTAVPKLREALAHGTAEQIGWLVVGDELKIDLSGFTTGQIETFNETYPQATRWEVTGFPTKTQLRLKPLLIASEGLADDVPDDIVKIVKGPGWWPAIDKLLKIGNVVLYRRDTHGKPRVVSHRSLPLSSKLQ

SEQ ID NO: 809 - protein, 1113 aa, Alcanivorax sp.
MRYRVGLDLGTASVGAAVFSMDEQGNPMELIWHYERLFSEPLVPDMGQLKPKKAARRLARQQRRQIDRRASRLRRIAIVSRRLGIAPGRNDSGVHGNDVPTLRAMAVNERIELGQLRAVLLRMGKKRGYGGTFKAVRKVGEAGEVASGASRLEEEMVALASVQNKDSVTVGEYLAARVEHGLPSKLKVAANNEYYAPEYALFRQYLGLPAIKGRPDCLPNMYALRHQIEHEFERIWATQSQFHDVMKDHGVKEEIRNAIFFQRPLKSPADKVGRCSLQTNLPRAPRAQIAAQNFRIEKQMADLRWGMGRRAEMLNDHQKAVIRELLNQQKELSFRKIYKELERAGCPGPEGKGLNMDRAALGGRDDLSGNTTLAAWRKLGLEDRWQELDEVTQIQVINFLADLGSPEQLDTDDWSCRFMGKNGRPRNFSDEFVAFMNELRMTDGFDRLSKMGFEGGRSSYSIKALKALTEWMIAPHWRETPETHRVDEEAAIRECYPESLATPAQGGRQSKLEPPPLTGNEVVDVALRQVRHTINMMIDDLGSVPAQIVVEMAREMKGGVTRRNDIEKQNKRFASERKKAAQSIEENGKTPTPARILRYQLWIEQGHQCPYCESNISLEQALSGAYTNFEHILPRTLTQIGRKRSELVLAHRECNDEKGNRTPYQAFGHDDRRWRIVEQRANALPKKSSRKTRLLLLKDFEGEALTDESIDEFADRQLHESSWLAKVTTQWLSSLGSDVYVSRGSLTAELRRRWGLDTVIPQVRFESGMPVVDEEGAEITPEEFEKFRLQWEGHRVTREMRTDRRPDKRIDHRHHLVDAIVTALTSRSLYQQYAKAWKVADEKQRHGRVDVKVELPMPILTIRDIALEAVRSVRISHKPDRYPDGRFFEATAYGIAQRLDERSGEKVDWLVSRKSLTDLAPEKKSIDVDKVRANISRIVGEAIRLHISNIFEKRVSKGMTPQQALREPIEFQGNILRKVRCFYSKADDCVRIEHSSRRGHHYKMLLNDGFAYMEVPCKEGILYGVPNLVRPSEAVGIKRAPESGDFIRFYKGDTVKNIKTGRVYTIKQILGDGGGKLILTPVTETKPADLLSAKWGRLKVGGRNIHLLRLCAE

SEQ ID NO: 810 - protein, 1146 aa, Alicyclobacillus hesperidum
MAYRLGLDIGITSVGWAVVALEKDESGLKPVRIQDLGVRIFDKAEDSKTGASLALPRREARSARRRTRRRRHRLWRVKRLLEQHGILSMEQIEALYAQRTSSPDVYALRVAGLDRCLIAEEIARVLIHIAHRRGFQSNRKSEIKDSDAGKLLKAVQENENLMQSKGYRTVAEMLVSEATKTDAEGKLVHGKKHGYVSNVRNKAGEYRHTVSRQAIVDEVRKIFAAQRALGNDVMSEELEDSYLKILCSQRNFDDGPGGDSPYGHGSVSPDGVRQSIYERMVGSCTFETGEKRAPRSSYSFERFQLLTKVVNLRIYRQQEDGGRYPCELTQTERARVIDCAYEQTKITYGKLRKLLDMKDTESFAGLTYGLNRSRNKTEDTVFVEMKFYHEVRKALQRAGVFIQDLSIETLDQIGWILSVWKSDDNRRKKLSTLGLSDNVIEELLPLNGSKFGHLSLKAIRKILPFLEDGYSYDVACELAGYQFQGKTEYVKQRLLPPLGEGEVTNPVVRRALSQAIKVVNAVIRKHGSPESIHIELARELSKNLDERRKIEKAQKENQKNNEQIKDEIREILGSAHVTGRDIVKYKLFKQQQEFCMYSGEKLDVTRLFEPGYAEVDHIIPYGISFDDSYDNKVLVKTEQNRQKGNRTPLEYLRDKPEQKAKFIALVESIPLSQKKKNHLLMDKRAIDLEQEGFRERNLSDTRYITRALMNHIQAWLLFDETASTRSKRVVCVNGAVTAYMRARWGLTKDRDAGDKHHAADAVVVACIGDSLIQRVTKYDKFKRNALADRNRYVQQVSKSEGITQYVDKETGEVFTWESFDERKFLPNEPLEPWPFFRDELLARLSDDPSKNIRAIGLLTYSETEQIDPIFVSRMPTRKVTGAAHKETIRSPRIVKVDDNKGTEIQVVVSKVALTELKLTKDGEIKDYFRPEDDPRLYNTLRERLVQFGGDAKAAFKEPVYKISKDGSVRTPVRKVKIQEKLTLGVPVHGGRGIAENGGMVRIDVFAKGGKYYFVPIYVADVLKRELPNRLATAHKPYSEWRVVDDSYQFKFSLYPNDAVMIKPSREVDITYKDRKEPVGCRIMYFVSANIASASISLRTHDNSGELEGLGIQGLEVFEKYVVGPLGDTHPVYKERRMPFRVERKMN

SEQ ID NO: 811 - protein, 1552 aa, Anaerophaga sp.
MFSQRNNPYCELLQNVKQLYKEKFGKTNQVDNSIIYGFMKRILGLDLGTNSIGWALVENDENDRKGKIIGMGSRIIPMDMSELDNFNKGASISKTAERTRLRMTRRLRERHLLRRARLHRILNIMGFLPEHYRNSIDFIDKKGCFFEGQEPKIAYKPDKNSEQFCFLFTSSFHEMLEDFRKFQPELIQNRKKVPYDWTIYYLRKKALTQKISKEELAWIILNFNTKRGYYHLRGEDEDNQDNKKIKEFRALKVVNVTEREGANSSGKKWYDMELENGWVYSRQSNLPPNLEGKTIELIVSYTLDNNGNIKKDKNGKEKYSLSMPGEEDWNLVKIKTENDLKTSKKSVGEYIYDHLLKNPDQKIRGKLISTIERKFYKEELSRILKTQMNFYEELKNRELYQKCVEELYPNNKSHQQTLLQKDFIHLIVEDIIFYQRPLKSKRAFVNNCPLEYRVYVDKKSGELIKSGVKCIPKSHPLFQEFRLWQYVRNLRIYERERMVNGRLMVNVDVTNELLPDEEHIVRLFDLLNDRKSFKQDDVLRFVGIKSPKDRKRYSWNYPEDKELPGNETRHLILAWLKKVDGVPEDWLDPEKLKALWHLLYSVTDREEIIKGLHSFAKKYELPDTFVEHFKKIPRLEREYGSFSEKAIKKLLPLMRMGKYWKAEEIPADLLEKAQKIIDAEADDRISDEVREKLLHLKDISQLKGLPLWQASYLVYGRHSETGEVVKWRTSEDLEKYILQFKQHSLRNPVVEQVILEALRVVKDIWEHYGEGKEGFFNEIHVEIGRELKNPADKRKKITSQIQENENTNLRIKALLEELFNDPSVKNVRPYSPAQQEILRIYEDGVLNGQKEIPDDILKISKMARPSKSQLVKYKLWLEQKYRSPYTGEIIPLSQLFTSAYEIEHIIPQARYFDDSFSNKVICEAEVNREKGHQLAFEFITKRGGDEIELNFGKKVTILNVEEYQKFVKDHYGRSLRSLSKMRKLLMEDIPDDFIDRQLNDSRYISKVVRNLLSNIVRAEDENSLVSKHLITCTGGVTTRLKHEWGLNDVWNELITPRFVRLNKMGKEKFGEWINKKGKQVFQIQMPLELQKGFNKKRIDHRHHALDALVVACASRSHVNYLNNDSARANASETRYDLRNKLCYKDKTDSNGNYRWKFYKPWESFTEEAKNRLAGTVVSFKSNRRIMTRSSNRYFKWVDTSEGKKKKLVRQIKGDNQAIRKPLHKDTVLGKVSLRKEKKVSLSKAIDLWESIVDKPLKKRIQSLREQGYDKKLLLKYFKDRNNQFNGQDISRVNIYFFDNNLAARRVTLDASFNSEKRIDGITDSGIKKILYAHLQNEKYHGKKDEKGNEISPYELAFSPEGLEEMNANIKKLNGGKPHCPIYKVRLAETIGEKFKLGEKGNKNKKYVEAAKGTNLFFAVYVDEKGVRSFETIPFSVALERRKQKLAVVPEENENKEKLLFYLSPNDLVYVPDEDEKLIDYRQLSINPTRIYKMVSSSGTQCFFIPHFVASPIVQTMELGPNNKSERAWDGQMIKNVCYKLSVDRLGNVKIEK

SEQ ID NO: 812 - protein, 1515 aa, Anaerophaga thermohalophila
MKRILGLDLGTNSIGWALVESDEEQKSGKIQGIGSRIIPMDQNELDNFNKGNTVSQTAERTRLRMVRRLRERHLLRRERLHRVLKEIGFLPEHYLEQIDFTEKPGGFLPGKEPKIAYKPDNFKDKYDFLFQDSYHEMLSDFQDKNPEFIQKRKKVPQDWTIYYLRKKALTAKITKEELAWIILNFNQKRGYYQLRGEDEDVAKNTKKEEFHALKVVKVKEREDSEGASGKWYDIELENGWVYPRQSNIRPDWEGKILELIVTYNLDKDGNIKTDKEGNEKRSFRMPNKDDWTLRKKRTENEIEKSGKTVGEYIYDNLLDAPDLKIRGKLVSTIERKYYRSELEQILTAQKKYHPELSNSELFNKCISNLYPNNDIHRKALLSKDFVHLIINDIIFYQRPLKSKRSTVSNCPLEYRVYVDKVTGEKKKVPLKCIPKSHPLYQEFRLWQYVKNLRLFEKERFENGRLLTNVDVTEQFLPDEDKYVELFEFLNGRKTFKQDDILKFAGIKSAKDRVKYYWNYPQEKEYPGNETRYLIESRLKKIENVPDEWLNYEKIEELWHLLYSVTDKVEIEKGLQSFAAKYQLPDLFVEVFKGFPRMEREYGAFSKKAIKKLLPLMRMGKYWKLENINPDLIEKVQKIIDGEADDNINDGIRERFSEINEMSDLRGMPLWKASYLVYGRHSEAAEVIRWRTSADLDQYIKDFKQHALRNPIVEQVVLEALRVVKDVWNYFGEGREKFFDEIHVEIGRDLKNPADKRQKIANQIQENENTNLRIKALLVELFNDPEVQNVRPYSPVQQQLLKIYEDGVLNAERDIPDDIQKISRMANPTRNQLIRYKLWLEQKYRSPYTGEIIPLNKLFTSEYEVEHIIPRARYFDDSFSNKIISEAEVNRKKDRMLAFEFIKKLGGSTIDLNYGKKVSVLTVEEYQQFVKDHYGINPHSRLKMQKLLMDEIPESFIERQLNDSRYISKMVRNLLSNIVREENENSPVAKQLITCSGSITNTLKQEWGLNDVWNTIITPRFERLNKMGEQKYGEWVNKEGKPVFQIQMPLELQKGFNKKRIDHRHHALDALIVASATRSHVNYLSNEAAKTNAKDTRFDLRNRLCYKEKRGQNRNFTWRFYKPWNTFTEDAKNALNDIVVSFKSNHRVINKSTNRYFKWENLPGGMKKKRLVRQEKGDNWAIRQSLHKDTVLGKVSLRKVKPVSLSVALDSWNNIVDKALKKKIRSLKDQGYDKKLMLKYFKDRRNEYNGENISRVNVYYFDEEMAARRVDLDTSFNSEKRIEGITDSGIKKIIYAHLKNEKYHGQKDDKGKDISPYELAFSPEGIAEMNANIKQLNGGKPHCPIYKVRLAEPVGEKFQLGETGNKTEKLVEVAKGTNLFFGVYANDEGVRSFATVPFYLAVEREKQGLPAVPQENENGDQLLFWLSPNDLVYVPSEEDAHFANPKQIELDNSRIYKMVSSTGTQCFFIPHFVATPIVQTIELGPNNKSERAWDGQMIKKVCYKLSVDRLGNVEIE

SEQ ID NO: 813 - protein, 333 aa, Bacillus cereus
MMNPNNFTKEDFWRTIILYGLNQATYKIALGQSLIRFSEQQRNVVSMNELAEDFFDMYLERLKNGKPQLATPNRQTAMERIINSYNIGRLTRSQAIEKVEREAFNDVIDRFHTVDSLQVPMKFYEKTDKGIVIFDNVFEIFSDNNNFELRNELDARWDLLESAFEIKRTDSQLVNDIRKLYLANGYERTDITKNRSVLNGYQSNVCFYCGELMSDDDVHVDHVIPRQLINHDDIWNLVLSHGFCNQQKSDNLPDVNYIEKLIERNEYFIKSNHPISNKLKERLGNTPRRRRTTIDRIYEHAKLVLAPWKGIYGYNPATDPFYKTFIRNIVLSK

SEQ ID NO: 814 - protein, 1068 aa, Bacillus cereus
MRYVLGLDIGIASCGWAVINQEKERIEDLGVRIFDKAENPKDGKSLAAPRRDARSTRRTLRRKKHRMQRIKILLVKQGLLFKTELNHLYESATEFDVWNLRLDALERKLHPKEFARVLIHLAKRRGFKSNRKETTLSENGQILESISENQQIMEQQNYRTVGEMILKDKKFENHKRNKDGTYIGTVTRQQLQDEIQMIFHTQRLYKNDYATEEFESSYLEIWASQRPYASKDQIEKMIGYCTLEPKEKRTPKASWSFQYFVALQTINNLRLISKDKIEELSFEEKKQIMNLALEKPIVKYIDIRKLLSIPNDFQFNSLSYSADTVDTTLENKRCIELKEYHSINKVYKQVYGKNTPNLLPIDYDTIAYGLTIFKDDKDILEYLQNKYVNAKGKPIKNLAKKTYDDTFIQALLNLNFTKMGHLSFKALKNIIPFLEEGLSYDKACEKAGYNFKGTSYTERTKYLPVIPQNTNPVVHRALSQTRKVINAIIKKYGSPNAIHIETARELSKTFQERKEIDSRYQDNSKKNEHAIHKLKELGNINPSGINIVKFKLWSEQDGRCMYSGKYIEPHRLFEEGYTEVDHILPYSRSLDDSYNNKILTLGTENQRKGNKTPYEYMGNTSIWDEFETRVQSNKKINFKKQQKLLLQNFSYAREQEFIERNLNDTRYATIYLTSLIQQHLIFSESSSKKKVRTVSGIITSHLRSRWGFNKDRKEGHIHHALDAVIVAVTSNHMIQRVTKYYKLKELNKNLQAKQLPFPEPWEGFRLELEARISPNTQQYLKGIHFKNYADVNLSDIKPIFVSRMPKRSITGELHQETIRKFLGYNEKGKVLTAIKTKLEDIPFDANGDFPMYGKETDLYTYNAIKERYLSHEKDKRKSFQEPLYKPTKSGEIGPLIKSIKIMDTRTIVNPVNQGKGVVYNSKIARTDVFKKEDKYYLIPIYTIDLLKNILPHKAITAGKGYEDWTTIDSSFTFLFSLFPNDLIQIVPSKNKTIKARTTVSKKEILLPSLTGYFKGVHSGTAGITVETHDGSVIANVGSKQLLLFEKYQVDVLGHYTKIKEEKRMGMAI

SEQ ID NO: 815 - protein, 1078 aa, Bacillus cereus
MRYVLGLDIGIASCGWAVINQEKERIEDLGVRIFDKAENPKDGKSLAAPRRDARSTRRTLRRKKHRMQRIKVLLVKHGLLSKTELDHLYESATEVDVWNLRLDALERKLYPKEFARILIHLAKRRGFKSNRKETTLSENGQILESISENQQIMEKQNYRTVGEMILKDKKFENHKRNKNGTYVGTVTRQQLQDEIQMIFHAQRLYKNDYATEEFESSYLEIWASQRPYASKDQIEKMIGYCTLEPKEKRAPKASWSFQYFVALQTINNLRLISKDRIEELSFEEKKQIMNLALEKSIVKYIDIRKLLSVPNEFQFNSLSYSADTVDTAVESRKCIELKEYHSINKVYKQIYGENALNLLPKYYDTIAYGLTIFKDDKDILEYLQNKYVNAKGKPISNFANKTYDDTFIQALLNLNFTKMGHLSFKALKNIIPFLEEGLSYDKACEKAGYNFKGTSYTEQTKYLPVIPQNTNPVVHRALSQTRKVINAIIKKYGSPNAIHIETARELSKTFQERKEIDSMYQDNSKKNEHAIHKLKELGNINPSGINIVKFKLWNEQDGRCMYSGKYIEPHRLFEEGYTEVDHILPYSRSLDDSYNNKTLTLGTENQRKGNKIPYEYMGNTSIWNDFETRVQSNKKINKKKQQKLLLQHFSYAREQEFIERNLNDTRYATIYLSSLIQQHLIFSESSRKKKVHTVSGIITSHLRSRWGFNKDRKEGHIHHALDAVIVAVTSDHMIQRVTKYYKLKELNRNLQAKRMPFPEPWEGFRLELEARISPNTQQYLKGLRFKNYADVNLSEIKSIFVSRMPKHSITGELHQETIRKFIGYNEKGKVLTAIKTKLEDIPFDANGDFPMYGKESDLYTYNAIKERYLSHKKDKRKSFQEPLYKPTKSGGIGPLIKSIKIMDTRTIVNPVNQGKGVVYNSKIARTDVFKKEEKYYLIPIYTIDLMKNILPQKAITAGKGYEDWTTIDPSFTFLFSLFPNDLIQIVPSKNKTIKARTTVSKKEVLLPSLTGYFKGVHSGTAGITVETHDGSVIANVGSKQLLLIEKYQVDVLGNYTKIKEEKRIGLTTYNDNKKIAAC

SEQ ID NO: 816 - protein, 1088 aa, Bacillus smithii
MNYKMGLDIGIASVGWAVINLDLKRIEDLGVRIFDKAEHPQNGESLALPRRIARSARRRLRRRKHRLERIRRLLVSENVLTKEEMNLLFKQKKQIDVWQLRVDALERKLNNDELARVLLHLAKRRGFKSNRKSERNSKESSEFLKNIEENQSILAQYRSVGEMIVKDSKFAYHKRNKLDSYSNMIARDDLEREIKLIFEKQREFNNPVCTERLEEKYLNIWSSQRPFASKEDIEKKVGFCTFEPKEKRAPKATYTFQSFIVWEHINKLRLVSPDETRALTEIERNLLYKQAFSKNKMTYYDIRKLLNLSDDIHFKGLLYDPKSSLKQIENIRFLELDSYHKIRKCIENVYGKDGIRMFNETDIDTFGYALTIFKDDEDIVAYLQNEYITKNGKRVSNLANKVYDKSLIDELLNLSFSKFAHLSMKAIRNILPYMEQGEIYSKACELAGYNFTGPKKKEKALLLPVIPNIANPVVMRALTQSRKVVNAIIKKYGSPVSIHIELARDLSHSFDERKKIQKDQTENRKKNETAIKQLIEYELTKNPTGLDIVKFKLWSEQQGRCMYSLKPIELERLLEPGYVEVDHILPYSRSLDDSYANKVLVLTKENREKGNHTPVEYLGLGSERWKKFEKFVLANKQFSKKKKQNLLRLRYEETEEKEFKERNLNDTRYISKFFANFIKEHLKFADGDGGQKVYTINGKITAHLRSRWDFNKNREESDLHHAVDAVIVACATQGMIKKITEFYKAREQNKESAKKKEPIFPQPWPHFADELKARLSKFPQESIEAFALGNYDRKKLESLRPVFVSRMPKRSVTGAAHQETLRRCVGIDEQSGKIQTAVKTKLSDIKLDKDGHFPMYQKESDPRTYEAIRQRLLEHNNDPKKAFQEPLYKPKKNGEPGPVIRTVKIIDTKNKVVHLDGSKTVAYNSNIVRTDVFEKDGKYYCVPVYTMDIMKGTLPNKAIEANKPYSEWKEMTEEYTFQFSLFPNDLVRIVLPREKTIKTSTNEEIIIKDIFAYYKTIDSATGGLELISHDRNFSLRGVGSKTLKRFEKYQVDVLGNIHKVKGEKRVGLAAPTNQKKGKTVDSLQSVSD

SEQ ID NO: 817 - protein, 1069 aa, Bacillus thuringiensis
MNYDIGLRIGITSCGWSIINKDLERIEDLGVRVFEKAENPDGTASAAPRREARKSRRKHRRKKHRIERIKRLIVQHDLLSKKELDSLYLSPFNIDVWNLRVEALERKLDNREFARVLIHLVQRRGFQTIRKSVEIQEEGKLLENVSENERIMKVNGYKTVGEMFSKHEKFTHHKRNKDGSYTSVVTRSLLLKEIKTIFNSQRILGNVFSTQKLESDYLYIWGSQRPTLTYEQLMSMVGNCIYEKKEKRAPKTSWAFQYFSLLQKINKLKVSDDNTLRKLSKEERDIVIELAFKKKNVSFVDIRKALKLNDNTKFNHLTYSHVVETKKVEKATFIELKGYHLIKKQLKDRNVELTQELQPKDYDAIAAASTFFKNDIEFRDYLRNQYLDSNGKRKSNIANKVFEDKVIAAVFELNFSKVCHLSFKSLYKLIPHLEKGLDYKEAILCAGYNFRDENKRDKKLFLPVIQQETNPVVHRALTQARKVINAIIREYGSPNTIRFVVANDLAKTYKQRKELESTLKKNRAENEKIKTKLLSMGIINPTGMDIVKYKLWYEQSGICLYTGRQMELSSLFKPGYSIVNHIIPYNRSFDDTYHNRVLTLTETKYEKGNKIPFEYFGAEETCWNEYEKRVSTSKKIHDKKREKLLIRNFDIEYENEMISNNVFDTHYIGSYFEKYIDEHLQFKKSTKKQKVFSIHGNMVAHLHSRWGFNKNSREIYLNHAVDAAIVAVLTDQLIRNIADYYRRDNILEQKGSLKFPEPWKSFSIELEARISPQVRDLIKKLNLDSYLDVDILHIKPVFISKKPRRKVNGEAHKSTIRSLIGINEIGKTVTCIKTRLEDIPFDENGDFPMYGKDTDKYTYTAIKERYLEFNKDKEKAFSTPLYKLKRNGEPGNQIKSVKIIDTRNIVNKVNQGKGIAYNSNIIRVDVFSRDQKYYVVPIYLRDFIKGSLPNKIITAAKGFMQWPETDNSYTFLFSIFPNDLIKVVPKEGKFIKAKNENKENINLTEILGYFKGLDSSTGAFTLESHDGSLLARGIGTKNLLLIEKYQVDVLGRYNKVGNEERQDIKIQQN

SEQ ID NO: 818 - protein, 206 aa, Bacteroides cellulosilyticus
MKKILGLDLGCNSIGWALVNEAENTEEISSIIKLGVRVNPLTVDEMQNFEKGKSITTNADRTLKRSMRRNLQRYKLRRDTLIEVLKEHGFITDSTLLSEHGNKTTFETYRLRAKAAVEEISLEKFARVLLMINKKRGYKSSRKAKGSEDGVLIDGMDVARKLYEEGLTPGELCLQILEAGKKNLPDFYRSDLQNEFDRIWNFQKLV

SEQ ID NO: 819 - protein, 349 aa, Bacteroides coprosuis
MKKILGLDIGTNSVGWAVVNTNQEGEPSQIEKLGSRIIPMSQDILDKFGQGQTVSSTASRTDYRGIRRLRERSLLRRERLHRVLHILDFLPKHYADSIGWDPRNSKTYGKFLPGTEVKLAWVPTADGHQFLFYSTYLEMLEDLKQTQAQLFETSQTPVPLDWTIYYLRKKALTQPITKHELAWLLLHFNTKRGYYQRRGELEDTPTDKLVEYHALKVVDVEVDPEDQSKKPWYFVHLENGWIYKRQSSEPLDNWKGLVKEFIVTTHLDKEGKPKLDKEGEVRRSFSSPKEDDWTLVKKKTENDLEKSGLTVGAYIYQTLLNKPNQKIRGGLIKHIERNYYVEELEQILR

SEQ ID NO: 820 - protein, 1504 aa, Bacteroides coprosuis
MKKVLGLDIGTNSVGWAVVNQNDKGEFLSIEKIGSRIIPMSQDVMDKFGAGQTESSTAQRTQYRGVRRLRERSLLRRERLHRVLHILHFLPQHYDAAIGWNKKENKTYGKFLPGVEVNIPWVATDQGHQFIFMDSYAEMLKDLKQHQPHLFEKSSTPVPLDWTIYYLRKKALTQAISKEELAWILLNFNQKRGYYQLRGEEVEDNTKREEFYALKVVKVELDKDNTSAKTWYKVHLENGFIYPCPSDTPIDSWVGMVKDFIVTTTLEKDGSEKRTADGEIKRSFRAPKEDDWTLLKKKTESELEKSGKQVGAFIYDTLLSNPDQKIIGGLIKTIERKYYKKELEQILETQQKFIAELSDKKLFQACAEELYPLNDSHRENLLERDFKHLFVQDIIFYHRPLKTKKSLISNCTYEYRTFYKNGEKQISPIKCIAKSNPLFQEFRVWQFVQNLRILQRQRSEGDSIKYNVDVTAEFLKDENDIANLFTWLNERKVIKQDQLLKSYFKLKVNKETKELDYRWNYVDDKNKEYPCNATRTHILSFLEKCKEEKRIEDDRFVYSLWHLLYSVVEPIELRGALAKFAEREHLHPSFVDVFAQFPPLEKEYGSYSEKAIKRLLPLMRMGDYWHEDKIDVKTKQRIQRIIDGEADDDITHRSREKVENLRSITDFKGLPLWKAGYVVYNRHSESGELTKWKTPHELSNYIQNEFKQYSLRNPIVEQIVLETLRVVHDLWVKHGDFSEIHLELGRDIKNSSDKRKRMAERQQENENSRQRVLEMLIDLKKEAAFADLNPYSPSQQEKLRIVEDGVLRSNIEIPKDIEKITKSAKPTSRELTKYRLWLDQKYRSPYTGQPISLAQLFTSKYEIEHVIPQAKYFDDSFTNKVICESEVNKEKGSMLAHEFILKNGGSTVNVGGRQVQVLKNDAYVELINRLYGKNNPVKAKKLLAEDIDEVVGDFSERQLNDTRYISRVVQKLLSNIVREEDEQESTSKHVIGCSGQVTTALKKDWGLNDIWNKIIQPRFERLNEMTATEDYGVWQSPNHFQIRVPEEIQKGFTKKRIDHRHHAMDALVIACATRSHINYISNRSGQDRNAKFETTRTDLRSKLCYKENSSGNNYNYIFNKPWDTFTQDAHRALENIVVSHKQNLRVLTKTNNYTQFINKDGKKDLQKQVKGDHFAVRKPMHQETIYGRVSIRSIKEVALKKALENWKQIVDRTLKDKIRELIGAYGKYDAQTILKYFKDRDYKFNNLKINRVEVYEYDHNCAAVRKSIGDDLTIKQIERITDESIRKILMNHLSNYDDNLKEAFSPEGLMEMNKNIKELNGGKNHQPIYKVRLFEDLGSKFPLGVSHNNPDKYAIAAKGTNLFFGIYEDQEGKRMFDSIPLNIVIDRLKEKKSPVPETYNESKLKFHLSPNDLVYVPTDEEQKQPELVDVDHLSDEQKGRVYKAVSFTGNRAFFVNHRVSKVIHDYVEFGTKNKIENDDDKRSLKHICWKLKVNRLGEITDVKR

SEQ ID NO: 821 - protein, 1509 aa, Bacteroides eggerthii
MKTILGLDLGTNSVGWAVINSVIKEQAERIWIEMAGSRIIPMDAAVLGDFDKGNSISQTSERTRLRGARRLRERQLLRRERLHKVLNILGFLPNHYLEYIDFEKHPGKFLADAEPKLAWVKDEQGKYTFLFQAAFDEMLADFAIHQPSLVSGDKKIPYDWTIYYLRKKALTEMISKEELAWILLNFNQKRGYYQLRGEEEEDNAGKSVEFYALKVLTVEATDEKKGRDVWYNVHLENGWIYRRSSSVPLDWEGQVKEFIVTTDLNPDGTPKLDKYGEVKRSFRAPKEDDWMLIKKRTEADIANTHKTVGAYIYDTLLQKPQQKIIGKLVKTVERKLYRDELSLILQKQCAFHAELQDRALYARCVEALYPSNEVRRKNIANRDFVYLLMDDILFYQRPLKTKKSLIANCPYEENEYVDRETGEIKKTPLKCIAKSHPLFQEFRLWNFLSNIRIYQKEKEINGTLHLDVDVTAEFLKTEDDYVALFDWLNSRKEIEQKTFLKYPKFGLKKEISNYRWNYVEDKQYPCNETRHAILSSLEKANVCIDFLSNEKEVALWHILYSVSDKQEIEKALRTFAAKNGLDESFVEAFKKFPPFKSEYGAYSAKAIKKMLPLMRCGKYWDVSSIDDTTKERIKKIVTGEYDERISVKVRDKVMNLSDISCFRRLPLWLACYIVYNRHSEDKEAVKWESPADIDAYLASFKQHSLRNPIVEQVITETLRVVRDIWKQVGRIDEIHIELGREMKNPADKRKRMTAQILENENANLRIKALLAEFMNPEYEIENVRPYSPSQQEILRIYEDTVLHAEDQLPEEIDAILKKFNSSKVPTKSEFLRYKLWLEQKYRSPYTGELIPLGKLFTAAYEIEHVIPQSRYFDDSFSNKVICESAVNKLKDNQLGYEFIKNHHGQKVEVGFGKSVEIFSVDSYERFVKEQYAKSAVKMKKLLMDDIPEQFIERQLNDSRYISKVIKGLLSNIVREKNDSGEYEPEAVSKNIVVCTGSVTDRLKRDWGMNDVWNSIVYPRFERLNSLTDTQSFGHWENKSGKKVFQTELPLEYQKGFSKKRIDHRHHAMDAIVIACATRNHVNYLSNESASRNAKISRYDLQRLLCDKNRTDDNGNYKWVIKKPWDTFTQDAREVLSKIVVSLKQNLRIINKTTNVYRHLDATGNRVYEKQKTGDSWAIRKPMHKDTVFGAVNLRKVKVVRLSVALDTPAMIVDKRVKNKVFELLSYKYDKKRIEKYFKENAFLWKELDLAKVAVYYFTEATTEPLVAVRKPLDSTFNEKKIKESVTDTGIQKILLNHLCTKEGKPDLAFSAEGIEEMNRNLLQLNNGKSHQPIYKVRVYEPRGNKFSVGVLGNKGTKWVEAAKGTNLFFAIYITEDGKRTYETIPLNVVIEREKQGLVPVPDRNKKGDKLLFWLSPNDLVYLPTEEEREFGRINEPIDRGRIYKMVSCTGNEGHFIPANVANPIVPVIELGSNNKAQRAWTNEMIKDICIPIKVDRLGHIIEVKYRIDE

SEQ ID NO: 822 - protein, 1526 aa, Bacteroides faecis
MKKILGLDLGTNSIGWAVLNAADDNSLKYIEAAGSRIIPMDAAILGDFDRGNSISQTAERTRIRGMRHLRERYLLRRARLHRILNLLGFLPFHYAQDIDRYGNFSADMEPKIAWCKNLEGELEFIFIESFNEMLEDFRKNQPELVADNKKVPYDWVIYYLRKKALEKKISKEELAWILLNFNQKRGYYQLRGEDDDESMKTAKTRQYFDKQIIKNIIDTNQTYKGQRILIVELQNGDKGKIFKKEIPDWIGQEKNIIVTVDIDKDGNDKYEESGSLSCRFKIPTDAEWESEWKLIKMKTQKDLDESNKTVGTYIYDSILQNPTQKVRGKLVRTIERKYYKAELKQILEKQTEFHSELQDKDLYIECLNELYSNNDTHRNAITDRDFVYLFMNDILFYQRPLKSKKSLIDNCPYERNIYIDKETGEIKYSPIKCIAKSHPLFQEFRLWKFISSIRIYQRESVVEVVDKQLDLFSSQSTSVQKLVTDVDVTDKFLTCENDYVALFEWLNKKKIIDQKEFLKYRPFGLKGDIDNYRWNYVEDKSYPCNETHAMILTYFAKAGISEDILTKEMEEALWHILYSVEDRQEITKALRTFASKYHLSDSFVKVFSNIPPFKKEYGSYSAKAIKKLLSLMRMGKYWSEDAIDVNTRERIDKIVTGEYDEKIRDRVREKTIRLNDIRHFRALPDWLACYVVYDRHSETREITEWKSPEEIDEYIRNFKQHSLRNPIVEQVITETLRTVRDIWKQVGCIDEIHVELGREMKNPADKRKRITSQIIENENANLRVKALLTEFVNSEFEIENVRPYSLSQQDILRIYEDGVLNSVAEVPGDIAGILKKFNENDAKKRPTTSEILRYKLWLEQKYRSPYTGEMIPLSKLFTSAYEIEHVIPQSRYFDDSFSNKVICEAEVNKLKDNALGYEFIKKHHGEKVELGFGKIVEIFSVSVYEQFVKDNYSRNRGKMKKLLMDEIPEQFIERQLNDSRYISKVVKTLLSNVVREKAEQEAVSKNVIVCTGGVTDRLKKDWGINDVWNKIVLPRFLRLNELTNSTNFTAKNAAGNEIPAMPLELQKGFNKKRIDHRHHAMDAIVIACANRNIVNYLNNESASRKAKISRHDLQAILCDKVRTDDKGNYQWRVKKPWDTFTQDVYVALENIIVSFKQNLRVINKTSNYYWHYENGKKVLVKQVKGDSWAIRKPMHKDTVFGEVNLRKVKSVSLNEALKNPQFIVEKDLKRQLLSLLQQNFDIKKIKKYFEEHKDIWSDISLSKMNIYYFTKETKDRYFATRKPLDASFDKKKIESCITDTGIQQILLRHLELKENDPERAFSPDGIDEMNRNIIQLNKGKGHHPIAKVRVYEKADKFEVGQRGNKSSKFVEAAKGTNLFFAVYETEYPDEKTNSIVRKRNYATIPLNIAIERQKRGLSTAPEDEKGNVPSFVLSPNDLVYLPTSEDIVNGHITQPIDKSRIYKMVSSSGSQCFFIKHNIANIIVDKYEFSPLNKMERAISNEMIKEICIPVKVDRLGNIVKLGKSE

SEQ ID NO: 823 - protein, 1509 aa, Bacteroides fluxus
MKTILGLDLGTNSVGWAVINSVIKEQAERIWIEMAGSRIIPMDAAVLGDFDKGNSISQTSERTRLRGVRRLRERQLLRRERLHKVLNILGFLPNHYLEYIDFEKHPGKFLSDAEPKLPWVKDEQGKYTFLFQAAFDEMLADFAIHQPSLVSGDKKIPYDWTIYYLRKKALTEMISKEELAWILLNFNQKRGYYQLRGEEEEDNAGKSVEFYALKVLTVEATDEKKGRDVWYNVHLENGWIYRRSSSVPLDWEGQIKEFIVTTDLNPDSTPKLDKYGEVKRSFRAPKEDDWMLIKKRTEADIANTHKTVGAYIYDTLLQKPQQKIIGKLVKTVERKLYRDELSLILQKQCAFHAELQDRTLYARCVEALYPNNEVQRRNIANRDFVYLLMDDVLFYQRPLKTKKSLIANCPYEENEYVDRETGEIKKAPLKCIAKSHPLFQEFRLWNFLSNIRIYQKEKEINGTLHLDVDVTAEFLKTEDDYVALFDWLNSRKEIEQKTFLKYPKFGLKKEISNYRWNYVEDKQYPCNETRHAILSRLEKANVCIDFLSNEKEVALWHILYSVSDKQEIEKALRTFAAKNGLDESFVEAFKKFPPFKSEYGAYSAKAIKKLLPLMRCGKYWDVSSIDDTTKERIKKIVAGEYDERIAVKVRDKVMNLSDISCFKRLPLWLACYIVYNRHSEDKEAVKWESPADIDAYLASFKQHSLRNPIVEQVITETLRVVRDIWKQVGRIDEIHIELGREMKNPADKRKRMTAQILENENANLRIKALLAEFMNPEYEIENVRPYSPSQQEILRIYEDMVLHAEDQLPEEIDAILKKFNSSKVPTKSEFLRYKLWLEQKYRSPYTGELIPLGKLFTAAYEIEHVIPQSRYFDDSFSNKVICESAVNKLKDNQLGYEFIKNHHGQKVEVGFGKSVEIFSVDSYERFVKEQYAKSAVKMKKMLMDDIPEQFIERQLNDSRYISKVIKGLLSNIVREKNDSGEYEPEAVSKNIVVCTGSVTDRLKRDWGMNDVWNSIVYPRFERLNSLTDTQSFGHWENKSGKKVFQTELPLEYQKGFSKKRIDHRHHAMDAIVIACATRNHVNYLSNESASRNAKISRYDLQRLLCDKSRTDDNGNYKWVIKKPWDTFTQDAREVLSKIVVSLKQNLRIINKTTNVYRHLDATGNRVYEKQKTGDSWAIRKPMHKDTVFGAVNLRKVKVVRLSVALDAPTMIVDKRVKNKVFELLSYKYDKKRIEKYFKENAVLWKELDLARVAVYYFTEATTEPLVAVRKPLDSTFNEKKIKESVTDTGIQKILLNHLCTKEGKPDLAFSAEGIEEMNRNLLQLNNGKRHQPIYKVRVYEPRGNKFSVGVLGNKGTKWVEAAKGTNLFFAIYITEDGKRTYETIPLNMVIEREKQGLAPVPDKNEKGDKLLFWLSPNDLVYLPTEEELEFGRINEPIDRGRIYKMVSSSGNQCFFIPQSISNAIIPTKELGANNKAERSWDGAMIKNICIPVKVDRLGRIIEVKYRINE

SEQ ID NO: 824 - protein, 1436 aa, Bacteroides fragilis; identical to SEQ ID NO: 155

SEQ ID NO: 825 - protein, 1512 aa, Bacteroides nordii
MKNILGLDLGTNSIGWAVINSEEDGPIVKKRIELAGSRIIPMDAAVLGNFDSGVTKSQTAERTSFRSIRRLRERQLLRRERLHKVLQILGFLPEHYVNDIDFENHPGKIKRNTEPKLPWRKNSMGQFEFIFQDSFEAMLTDFATHQPVFVSEGKKVPYDWTLYYLRKKALTEGISKEELAWLILNFNQKRGYYQLRGEEEEEQSNKLVEFYALRVVKVEATDDKKGKDTWYNVHLENGWIYRRTSNIPLDWEGKVKEFIVTTDLNEDGTPKLDKYGEVKRSFRAPKEDDWTLIKKKTESDIANSHKTVGCYIYDALLQNPHQKIKGRLVRTVERKFYKEELRLILEKQLSFHPELQDRDLYRACIDALYVSNEAHKNNISGRDFVYLFIDDIIFYQRPLKTKKSLIDNCPYEENQYMDRETGEVKQAPIKCIAKSHPLFQEFRLWQFISNIRIYQRERVLDDGKLETDVDVTPDFLKTEDDYTTLFEWFNDRKEVDQKAFLKNPQFGLKKTFTEYRWNYVEDKSYPCNETRNAILNGLQKAGVSADFLSREVEEALWHILYSVEDKIEIESALRKFASKHDLDDRFADVFKKLPPFKKEYGAYSAKAIKKLLPLMRIGKYWELSNIDDKTKERIDKIITGEWDENIHDRVREKAIKLSDITDFKGLPLWLSCYVVYNRHSEARAIAKWESPEDIDSYLRLFRQHSLRNPIVEQVITETLRTVRDIWKRVGQIDEIHVELGREIKNPADKRAKMTAQIVENENTNLRIKALLAEFINSEYEIENVRPYSSNQQEKLKIYEDTVLNGVKEIPEDINTILKKFRESDLKKRPTKSDFLHYKLWLEQKYCSPYTGRIIPLGKLFTSAYEIEHIIPQAHYFDDSFSNKVICEAEVNGLKDKKLGYEFIKHNPGKMVEIGFGKPPVRIFSVEEYERFVKENYSGIKNKMNKLLMDDIPETFIERQLNDSRYISKVVKSLLSNIVREKDSNGEYEPEAISKNVIVCTGSVTDRLKRDWGVNDVWNSIIYPRFERLNELTGSQQFGCWENKEGKRVFQTAVPLEMQKGFSKKRIDHRHHAMDAIVIACATRNHINYLSNESASKKAKISRTDLQRLLCTKCRTDDNGNYKWIVKKPWPAFTQDIRKALENITVSFKQNLRVINKTTNYYVHFDESGKKVLEKQINGDSWAIRKPMHKDTVFGKVNLQKVKEVRLSLALDTPKMIVDKKLKEKVLQLYSYKYDKKRIDKYFKENASLWKDLNLSKVAVYYFTNDSTEPLVAVRKPLDTSFNAKKIKESVTDTGIQKILLNHLSNNQDDPNLAFSPDGIDKMNKNLTALNDGKYHQPIYKVRVCEPQGNKFSVGTSGNKTSKYVEAAKGTNLFFAVYQTEDGKRSYETIPLNVVIEREKLGWTPVPENNNNGDKLLFWLSPNDLVYVPTADELNNGMRLDNMDKGRIYKMISCSGPQCFFIPQNVSNAIIPVIELGANNKAEKSWNNEMIKVVCVPIRVDRLGCITQINNQK

SEQ ID NO: 826 - protein, 779 aa, Bacteroides oleiciplenus
MKEGNQYDVACEYAGYRHSKSSLTREEIDNKVLKNRLEILPKNSLRNPVVEKILNQMVNVVNAVIDTYGKPDEIRVELARELKKGAKEREELAKSIAQNTREHEAIRQLLQTEFGMMHVTRNDIIRYKLYEELKDNGYKTLYSDQYIPREKVFSKEIDIEHIIPQARLFDDSLSNKTLEYRAVNIEKGNKTAYDFVKEKYGNDGLRRYLNHCEALFKDKKTKLKKLKMEDQDIPDGFIDRDLRNTQYIAKKALSMLSEISRRVVATTGSITDELRKDWQLVDIMKELNLPKYEALGFVETFKDKDGRIIKKIKDWSKRNDHRHHAMDALTVAFTKDVFIQYFNNKNAFWMSGSKEHANITAIKNKYFEKGKALAPIPLELFRTEAKHHLENILVSIKAKNKVVTNNINRTKKKNGENLKLQQTPRGQLHLESIYGSYRQCIIRDEKVNASFDASKIANVSKSAYRNALLKRLEAYDNDPKKAFTGKNSLDKNPVYLDENKMEKVPDRVKIVEFETVYTIRKPIDPKLSIDKVVDARIRTLLKKRLEEYGGDAQRAFSNIEENPIWLNKEKGISVKRVAIRGISNAQALHDKKDKDGNPILDKEGKGIPTDFVNTSNNHHVAIYRKPVVDKMGQVILDENGSPRYELGEDVISFFEAVARVNLRQPVVDKDYKRSEGWQFLFSMKQNEYFVFPNEKTGFNPKEIDLLNPENYALISPNLFRVQKIGLNDYTFRHHLETSIQNNSNELKFITWIRCGKNGINGVIKVRVNHIGQIVSMGEY

SEQ ID NO: 827 - protein, 653 aa, Bacteroides oleiciplenus
MKKILGLDLGSSSIGWALVNEGANDEEKSSIIKLGVRVNPLTVDEAQNFEKGKSITTNADRTLKRGMRRNLQRYKQRREALVEVLKKHEFITAGTLMSEQGNKTTFETYRLRAKAVEEEISLEEFARVLLMINKKRGYKSSRKAKGDEDGVLIDGMDVAKKLYDEDLNPGELCLQLLEAGKKTLPDFYRSDLQDEFDKIWNFQKQFNPESFCDTAKEEVRGKNRTQTWTILSKYFVWTEGDSVWNNEEARTEERIKEYKLVGIKRTTKGYEQKLENYRWRVQALSEQLNPEIIAIVLQEINGQISASSGYLGAISDRSKELFFNHQTVGQSLMSELDKNPNGSLRNKVFYRQDYLDEFNTIWEKQSLYHKELTVELKKEIRDIIIFYQRRLKSQKGLISTCEFEQREIIVEKDGKRKTKIIGCKVIPRSHPLFQEFKIWQTLNDVEVYVADRRTKRKQDRKSTTLFSDTEDILLVEGKRYLYQEEKELLAKELFVRENMKKAEVLKLLFEDPKELDLNFKQIDGNRTGFALFSAYSKMIEKYGYESVNFKNSADEIIEKLQIIFADLGWNTELFSIDLSKDDKELEKQPYFRLWHLLYSFEGDNTPTGNGKLIEALMRLCSVEKEYASVLANVSFQEDYGSLSAKAIKKYYLI

SEQ ID NO: 828 - protein, 1436 aa, Bacteroides sp.
MKRILGLDLGTNSIGWALVDEAENKDERSSIVKLGVRVNPLTVDELTNFEKGKSITTNADRTLKRGMRRNLQRYKLRRETLMEVLKEHKLITEDTILSENGNRTTFETYRLRAKAATEKISLEEFARVLLMINKKRGYKSCRKAKGAEEGTLIDGMDIARELYNNNLTPGELCLQLLDAGKKYLPDFYRSDLQNELDRIWEKQKEYYPEILTEVLKEELRGKKRDAVWAICAKSFVWEEYYTEWNKEKGKTEQQEREHKLEGIYSKRKRDEAKRENLQWRVNGLKEKLSLEQLVIVLQEMNIQINNSSGYLGAISDRSKELYFNKQTVGQYQMEMLDKNPNASLRNMVFYRQDYLDEFNTLWEKQAEYHKELTGELKKEIRDIVIFYQRRLKSQKGLVGFCEFESRQIEVEIDGKKKIKTVGNRVIPRSSPLFQEFKIWQILNNIEVTVVGKKGKRRKQKDNSPTLFDGLDDTEQLELNGSRYLYQEEKELLAQELFVRDKMTKSDVLKLLFDNPQELDLNFKTIDGNKTGYTLFQAYSKMIEMSGHEPVDFKKTVEKVVEHVKAVFDLLNWNTDILGFNSNEELDNQSYYKLWHLLYSFEGDNTPTGNARLVQKITELYGFEKEYAIILANVTFQDDYGSLSAKAIHKILPHLKEGNRYDVACAYAGYKHSESSLTKEEIANKALKDRLTLLPKNNLRNPVVEKILNQMVNVINAIIDTYGKPDEIRVELARELKKNAKEREELTKFIAETTRKHEEFKILLQSEFGLTNVSRTDILRYKLYKELESCGYKTLYSNTYIPREKLFSKEFDIEHIIPQARLFDDSFSNKTLEARSINLEKGNKTAYDFVKEKFGESGADNSLDHYLNNIEDLFKSGKISKTKYNKLKMAEQDIPDGFINRDLRNTQYIAKKALSMLNEISRRVVATSGTITDKLRQDWQLVDVMKELNWEKYKALGLVEYFEDKDGRQIGRIKDWTKRNDHRHHAMDALTVAFTKDIFIQYFNNKNASLNSNTNEYAIKNKYFQNGRAIAPIPLREFRVEAKKHLENTLISIKAKNKVVTGNINKTKKRGGVNKYLQQTPRGQLHLETIYGSGKQYLTKEEKVNASFDMKKIATVSKSAYRDVLLKRLHENDNDPKKAFTGKNSLDKQPIWLDKEQTRKVPEKVKTVTLETIYTVRKEISPDLKVDKVIDAGVRKILTGRLNEYGNDAKKAFSNLDENPIWLNKEKGISIKRVTISGISNAQSLHVKKDKDGKPILDEDSRNIPVDFVNTGNNHHVAVYRRPVIDKRGQLVIDEAGNPKYELEEVVVSFFEAVTRANLGQPIIDKDYKTSEGWQFLFSMKQNEYFVFPNEKTGFNPKEIDLLDAENYGVISPNLFRVQKFAHKNYVFRHHLETTIKDTSSILKGITWIDFRSSKGLDAIVKVRVNHIGQIVSVGEY

SEQ ID NO: 829 - protein, 1510 aa, Bacteroides sp.
MKRILGLDLGTNSIGWALVDSEEQRILGMGSRIIPMDQGVLDTFSGGNPVETQTAARTAYRGTRRLRERALLRRERLIRVLNMMKFLPEHYASQIDFEKRLGQFFDEKEPKLAWKQNDEGRFEFIFQQSFNEMIEEFKNKGVVREDKKIPYDWTIYYLRKKALSQEIEKEELAWILLNFNQKRGYYQLRGEEEEENPNKLVEYYSLKIVDVIADEKPNSKGDIWYSLHLENGWIYRRSSKIPLFGWKDKTRDFIVTTDLNDDGTVKKDKEGIEKRSFRAPSENDWVLLKKKTESDIEKSHKTVGAYVYETLLQNPMQKVRGKLVRTIERKFYKDELKQILEKQREFHPELRDEDLYNDCVRELYRSNETYQFILSKRDFVHLFLDDILFYQRPLRSQKSAIGDCILEFKTYKDKDGNNIKEYLKVISKSNPLYQEFRIWQWLYNLKIYRKEDDEDVTLQFIANIEDKEQLFDFLSNRKSIEQKPLLEYLIKAKGLKKQVKTEAYRWNYVEDKIYPCSETKTMISTRLAKVENIPDNFFTKEIEQKLWHIIYSVTDKNEFEKALRTFAKKYDLDIASFVDNFKKIPPFKNEYGSFSEKAIKKLLPLMRLGKYWKWNDIDNNTQNRISKIITGEYDEEIKDIVREKSIALTNENDFQGLQLWLAQYLVYGRHSEADIAGKWHSVADLEKYLNEFKQHSLRNPIVEQIITETLRVVRDIWRKYGQGAENFFSEIHVELGRDMKNTADERKKIVNVVTENENTNLRIKALLMELKNNSDGKLEVENVRPYSPTQQDILKIYEEYAISTGLDNEKDEKVKEDIKKISRVAQPTTTELQRYKLWLEQKYCSPYTGKVIPLGKLFTEEYQIEHIIPKSRYYDDSFSNKVICEAAVNKLKDKCLGLEFIKNYHGQIVETGFGQKVTIFDEEAYQNFVKQHYAYNRSKRTKLLLEEIPEKMIERQMNDTRYISKFVLPLLSNLVRAEENDNGVNSKNVLPVNGKITTMLKQDWGLNDVWNDLILPRFVRMNELAKTIAFTSWNEQHQKYLPTVPLELSKGFQKKRIDHRHHAMDALVIACATRDHVNLLNNKHANTDTIRYDLQRKLRLFERVTYIDPQTKNNVTKDIPKEFKKPWDNFTVDARNELEKIIVSFKQNLRIINKATNIYTKYENGKKIKVGQKGLNWAIRKPLHKETVFAKVSLRKRKTVRLSEALKDWKKIVDKKLKQEIKRLTCQYGKFDVDTILRYFKDRKYQFGEVDVSKVKMYYFDEENAAVRKNVDTSFTEKFIQGSVTDTGIQKILLNHLEAKGNKVEIAFSPEGIEEMNKNIIQLNEGKLHLPIFKVRVYETIGNKFSVGVKGNKKDKYVEAAKGTNLFFAIYVDENGIRSYETIPLNIVIERLKQGLSVVPEKNRKEHSLLFYLSPNDLVYVPIEDERENIHAVNLDQLNNEQRKRIYKMVSCTGSECHFVPYYVASPIVNKVEYSSLNKIGRSLTGEMIKDVCIKLKVDRLGNVKGISGL

SEQ ID NO: 830 - protein, 1436 aa, Bacteroides sp.
MKRILGLDLGTNSIGWALVNEAENKDERSSIVKLGVRVNPLTVDELTNFEKGKSITTNADRTLKRGMRRNLQRYKLRRETLTEVLKEHKLITEDTILSENGNRTTFETYRLRAKAVTEEISLEEFARVLLMINKKRGYKSSRKAKGVEEGTLIDGMDIARELYNNNLTPGELCLQLLDAGKKFLPDFYRSDLQNELDRIWEKQKEYYPEILTDVLKEELRGKKRDAVWAICAKYFVWKETYTEWNKEKGKTEQQEREHKLEGIYSKRKRDEAKRENLQWRVNGLKEKLSLEQLVIVFQEMNTQINNSSGYLGAISDRSKELYFNKQTVGQYQMEMLDKNPNASLRNMVFYRQDYLDEFNMLWEKQAVYHKELTEELKKEIRDIIIFYQRRLKSQKGLIGFCEFESRQIEVDIDGKKKIKTVGNRVISRSSPLFQEFKIWQILNNIEVTVVGKKRKRRKLKENYSAIFEELNDAEQLELNGSRRLCQEEKELLAQELFVRDKMTKSEVLKLLFDNPQELDLNFKTIDGNKTGYALFQAYSKMIEMSGHEPVDFKKPVEKVVEYIKAVFDLLNWNTDILGFNSNEELDNQSYYKLWHLLYSFEGDNTPTGNGRLIQKMTELYGFEKEYATILANVSFQDDYGSLSAKAIHKILPHLKEGNRYDVACVYAGYRHSESSLTREEIANKVLKDRLMLLPKNSLHNPVVEKILNQMVNVINVIIDIYGKPDEIRVELARELKKNAKEREELTKSIAQTTKANEEYKTLLQTEFGLTNVSRTDILRYKLYKELESCGYKTLYSNTYISREKLFSKEFDIEHIIPQARLFDDSFSNKTLEARSVNIEKGNKTAYDFVKEKFGESGADNSLEHYLNNIEDLFKSGKISKTKYNKLKMAEQDIPDGFIERDLRNTQYIAKKALSMLNEISHRVVATSGSVTDKLREDWQLIDVMKELNWEKYKALGLVEYFEDRDGRQIGRIKDWTKRNDHRHHAMDALTVAFTKDVFIQYFNNKNASLDPNANEHAIKNKYFQNGRAIAPMPLREFRAEAKKHLENTLISIKAKNKVITGNINKTRKKGGVNKNMQQTPRGQLHLETIYGSGKQYLTKEEKVNASFDMRKIETVSKSAYRDALLKRLYENDNDPKKAFAGKNSLDKQPIWLDKEQMRKVPEKVKIVTLEAIYTIRKEISPDLKVDKVIDVGVRKILIDRLNEYGNDAKKAFSNLDKNPIWLNKEKGISIKRVTISGISNAQSLHVKKDKDGKPILDENGRNIPVDFVNTGNNHHVAVYYRPVIDKRGQLVVDEAGNPKYELEEVVVSFFEAVTRANLGLPIIDKDYKTTEGWQFLFSMKQNEYFVFPNEKIGFNPKEIDLLDVENYGLISPNLFRVQKFSLKNYVFRHHLETTIKDTSSILRGITWIDFRSSKGLDTIVKVRVNHIGQIVSVGEY

SEQ ID NO: 831 - protein, 1424 aa, Bacteroides sp.
MKRILGLDLGTNSIGWALVNEAETDEEVSSIIRLGVRVNPLTVDETQNFEKGKSITTNAERTLKRSMRRNLQRYKLRRDALVEFLKELGFITDETILSEQGNRTTFETCRLRAKAAEEEISLEELSRVLLMINKKRGYKSSRKVKKEEDGVLIDGMEIAKKLYEEDLTPGQLCSQLLESGKKVLPDFYHSDLQEELDRIWSVQKQFHPDVFCDAAKEEIKGKNRSQTWAILANYFVWKEEVVGWNDREAKNETIEKECKLVGLKRTTKGYELKKENYRWRAQALTEQLGLEEIAVVLQEINGQINASSGYLGAISDRSKVLYFNHQTVGQYQMAELDKNPHASLRNMVFYRQDYLDEFDRIWEKQAEFHKELTAELKKEIRDMIIFYQRRLKSQKGLISFCEFERLEIVVEKDGKKQTKVIGCKVIPRSHPLFQEFKVWQTLNDIKVLGREKKRNALSASESRALYPEEKEILARELAIKENMKKADVLKLLFENPQELDLNFKQIDGNRTGFSLFSAYSKMIEKYGYEPLDFKKPADEIIGQLRTIFTDLGWNTNLFTIDLTKEGKELEMQPYFRLWHLLYSFEGDNTSTGNGKLIEKIMQLCGVEKEYAVELASLSFQDDYGSLSAKAIKRILPYLKEGNLYDVACEYAGYRHSKSSLTKEEIENKVLKGKLEVLPKNSLRNPVVEKILSQMVNVINTIIDTYGKPDEIRVELARELKKSAKEREELTKAIAKSTREHEEIRKLLQDEFGMMNVSRNDIIRYKLYEELKDNGYKTLYSNQYIPKEKIFSKEIDIEHIIPQSRLFDDSLSNKTLEYKAINIEKGNKTAYDFVKEKYGEEGLQQYINRCESLFNDKKAKLRKLKMEQKDIPDGFIDRDLRNTQYIAKKALAMLNEICRRVVATTGSITDQLREDWQLVDVMKELNLPKYEALGFVETYEDKDGRKIKRIKDWTKRNDHRHHAMDALTVAFTKDAFIQYFNNKNAAQDSGNRNHTNIIGIKTRYFDKGRALPPIPLEQFRIEAKQHLEKLLVSIKAKNKVVTVNVNRTKKRKGENTKIQQTPRGQLHLETVYGSHKQYVTKIEKVNASFDAAKIATVSKRAYRNALLKRLETFGNDPKKAFTGKNALEKNPLYADKYQTIRVPEKVQTVEFETIYTIRKPVDPALNVDKVVDVKVRAILERRLKEYGGDPKKAFVNFWENPIWLNKEKGISIKRVSIRGINNAQSIHVKKDKNGNPIWDENGKQIPVDFVNTGNNHHVAIYRKPVLDKKGQVTFDEDGNLMYELDEVVVPFFEAVTRANLGLPIIDKDYRKSEGWQFLFSMKQNEYFVFPNEKTGFNPKEVDLLNPDNYAMISPNLFRVQTMSKVMYGNNVVRDYKFRHHLETTVKDMKELKDIAYKQYKTLSFGNSVVKIRINHIGQIVSVGEY

SEQ ID NO: 832 - protein, 1055 aa, Bacteroides sp.
MRIYRKDLAQDVDVTNELLKTEEDYVALFDWLNGKKEIDQKAFLKYPLFGLKKEVENYRWNYVQDKPYPCNETRSSMLARLEKCDISIEFLTKENEEALWHILYSVEDKNEIVKALQKFADKHDLNASFVDVFQKFPPFKKEYGSYSAKAIKKLLPLMRMGKYWSENSIDKGTRERMDKIITGEYDEKIENRVREKAIHLADVSDFKGLPLWLVCYIVYGRHSEAKEITQWKSPADIDLYLRSFKQHSLRNPIVEQIIIETLRVVRDIWKQVGNIDEIHVELGREMKNPADKRKKMTQQMSENENTNLRIKYLLTEFLNPEYEVENVRPYSPSQQDILRIYEEGVLNSVSDLPEEISDILKKFTETDLKKRPSRSEVLRYKLWLEQKYRSPYTGEVIPLGKLFTPAYEIEHVIPQSCYFDDSFSNKVICEAEVNKLKSNLLGHEFIVKHHGEIVELPFGKKVRIFTVDEYEQFVKDNYSRTRSKMKKLLMDDIPEEFVARQLNDSRYISKVVKSLLSNIVREKGEEEAISKNVIPCTGGVTDRLKKDWGINEVWNKIILPRFQRLNELTGTNKFTTKNVGIQEIPTMPLELQKGFNKKRIDHRHHAMDAIIIACANRNIINYLNNESATAKAELSRYDLQKMLCDKAKTDNNGNYKWVIRKPWASFTQDTYLALENIIVSFKQNLRVINKATNHFLHYNEEGKKIFVKQGKGDNWAIRKSMHKDTVFGEVNLRRIKTVALNEAMKNPQSIVVKDFKRKLLELWNLGFDAKRIKKYFEDNRETWSDINLSKIEVYYFSKDTKDRFFATRKPLDTSFDRKKIENNITDTGIQKILLRHLELKDNNPDIAFSPDGIDEMNRNIIQLNNGKYHQPIIKVRWYEQADKFAVGQTGNKSSKFVEAAKGTNLFFAVYESNILDKKTNTIIKKRNYATIPLNVAIERQKQGLPVAPEDENGNDPIFVLSPNDLVYLPTAADLANGIIAQPLDRGRIYKMVSCTGNEGYFIPARIANPILQTIELGSNNKAQKAWTDEMIKEICMPIKVDRLGNVLESSSSYKK

SEQ ID NO: 833 - protein, 1055 aa, Bacteroides sp.
MRIYRKDLAQDVDVTNELLKTEEDYVALFDWLNGKKEIDQKAFLKYPVFGLKKEIENYRWNYVQDKPYPCNETRSLMLARLEKCDISIEFLTKENEEALWHILYSVEDKNEIVKALQKFADKHDLNASFVDVFQKFPPFKKEYGSYSAKAIKKLLPLMRMGKYWSENSIDKGTRERIDKIITGEYDEKIENRVREKAIHLADVSDFKGLPLWLVCYIVYGRHSEAKEIIQWKSPADIDSYLRSFKQHSLRNPIVEQIIIETLRVVRDIWKQVGNIDEIHVELGREMKNPADKRKKMTQQMSENENTNLRIKYLLTEFLNPEYEVENVRPYSPSQQDILRIYEEGVLNSVSDLPEEISDILKKFTETDLKKRPSRSEVLRYKLWLEQKYRSPYTGEVIPLGKLFTPAYEIEHVIPQSCYFDDSFSNKVICEAEVNKLKSNLLGHEFIVKHHGEIVELPFGKKVRIFTVDEYEQFVKDNYSRTRSKMKKLLMDDIPEEFVTRQLNDSRYISKVVKSLLSNIVREKGEEEAISKNVIPCTGGVTDRLKKDWGINEVWNKIILPRFQRLNELTGTNKFTTKNVGIQEIPTMPLELQKGFNKKRIDHRHHAMDAIIIACANRNIINYLNNESATAKAELSRYDLQKMLCDKAKTDNNGNYKWVIRKPWASFTQDTYLALENIIVSFKQNLRVINKATNRFLHYNEEGKKIFVKQGKGDNWAIRKSMHKDTVFGEVNLRRIKTVALNEAMKNPQSIVVKDFKRKLLELWNLGFDAKRIKKYFEDNRETWSDINLSKIEVYYFSKDTKDRFFATRKPLDTSFDRKKIENNITDTGIQKILLRHLELKDNNPDIAFSPDGIDEMNRNIIQLNNGKYHQPIIKIRWYEQADKFAVGQTGNKSSKFVEAAKGTNLFFAVYESNILDKKTNTIIKKRNYATIPLNVAIERQKQGLPVAPEDENGNDPIFVLSPNDLVYLPTDDELANGIIAQPLDRGRIYKMVSSSGEQCFFIKHIVANVLVDKFEFSPLNKMERALTGEMIKMICIPIKVDRLGNVLESSSSYKK

SEQ ID NO: 834 - protein, 286 aa, Bacteroides uniformis
MLSYKYDKKKIEKYFKENAFLWKELDIAKVAVYYFTENTTEPLVAVRKSLDSTFNEKKIASVTDTGIQKILLNHLKSKEGKAELAFSAEGIEEMNRNLLQLNDGKGHQPIYKVRVYEPRGNKFKVGVLGNKGAKWVEAAKGTNLFFAIYITEDGNRTYETIPLNWVIEREKQGLVPVPDRNEKGDKLLFWLSPNDLVYLPTEEERDFGRINEPIDRGRIYKMVSSSGNQCFFIPQSISNAIISTKELGSNNKAEKSWDGEMIKNICIPVKVDRLGRIIEVKYRVNE

SEQ ID NO: 835 - protein, 1508 aa, Bacteroides uniformis
MRTILGLDLGTNSIGWAVINSVIKEQTERIWIEMAGSRIIPMDAAILGDFDKGNSISQTAERTRFRGVRRLRERQLLRRERLHKVLKILGFLPEHYLKGIDFEKHTGKFLSGSEPKLPWVKDRWGKYSFLFQTAFNEMLADFAKHQPSLVFDGKKIPYDWTVYYLRKKALTEMISKEELAWILLNFNQKRGYYQLRGEEEEDNAGKSVEFYALKVLSVEATDEKKGRDIWYNVHLENGWVYRRSSNVPLDWEGRVKEFIVTTDLNPDGTPKLDKYGEVKRSFRAPKEDDWMLIKKRTEADITGTHKTIGSYIYDALLQEPQQKIIGKLVKTVERKFYKEELNFILQKQCAFHAELQDRDLYMRCIEALYPGNEVQRRNIANRDFIYLLIDDVLFYQRPLKTKKSLIANCPYEENEYVNRKTGEIKTAPLKCIAKSHPLFQEFRLWYFLSNIRVYQKEREVNGTLHLDVDVTTEFLKTEDDYVALFDWLNSRKEIDQKAFLRYPAFGLKKEINNYRWNYVEDKFYPCNETRHAILSRLEKAGIGIDFLSDEKETALWHILYSVSDKQEIEKALATFAVKNGLNESFVEVFKKFPPFKSEYGAYSAKAIKKLLPLMRCGKYWDMSLIDGTTKERIERIIAGECDESIGAKVREKAMNLSDISCFKRLPLWLACYVVYNRHSEDKEITKWETPADIDAYLAAFKQHSLRNPIVEQVITETLRVVRDIWKQVGKIDEIRIELGREMKNPADKRKRMTTQILENENANLRIKALLAEFVNPEYGVENVRPYSPSQQEILRIYEDAVLKGEEQIPEDIDVILKKFNTSKLPTKSEFLRYKLWLEQKYRSPYTGELIPLAKLFTAAYEIEHVIPQSRYFDDSFSNKVICESAVNKLKDNQLGYEFIKNHHGQKVEVGFGKTVEIFSVDSYERFVKEQYAKSGIKMKKLLMDDIPEQFIERQLNDSRYISKVVKGLLSNIVREKNDSGEYEPEAVSKNILVCTGSVTDRLKKDWGMNDVWNSIVSPRFERLNALTETQCFGHWENKDGKKVFQTAVPLEYQKGFSKKRIDHRHHAMDAIVIACATRNHVNYLNNESASRNAKISRYDLQRLLCDKSRGDGNGNYRWIIKKPWTTFTQDAREALSGIIVSLKQNLRIINKTTNIYQHFDANGTRVYEKQKIGDSWAIRKPMHKDTVFGAVNLRKVKVVRLSVALDTPSMIVNKRVKNKVLELLSYKYDKKKIEKYFKENAFLWKELDIAKVAVYYFTENTTEPLVAVRKSLDSTFNEKKIASVTDTGIQKILLNHLKSKEGKAELAFSAEGIEEMNRNLLQLNDGKGHQPIYKVRVYEPRGNKFKVGVLGNKGAKWVEAAKGTNLFFAIYITEDGNRTYETIPLNWVIEREKQGLVPVPDRNEKGDKLLFWLSPNDLVYLPTEEERDFGRINEPIDRGRIYKMVSSSGNQCFFIPQSISNAIISTKELGSNNKAEKSWDGEMIKNICIPVKVDRLGRIIEVKYRVNE

SEQ ID NO: 836 - protein, 1210 aa, Bacteroides uniformis
MRTILGLDLGTNSIGWAVINSVIKEQTERIWIEMAGSRIIPMDAAILGDFDKGNSISQTAERTRFRGVRRLRERQLLRRERLHKVLKILGFLPEHYLKGIDFEKHTGKFLSGSEPKLPWVKDRWGKYSFLFQTAFNEMLADFAKHQPSLVFDGKKIPYDWTVYYLRKKALTEMISKEELAWILLNFNQKRGYYQLRGEEEEDNAGKSVEFYALKVLSVEATDEKKGRDIWYNVHLENGWVYRRSSNVPLDWEGRVKEFIVTTDLNPDGTPKLDKYGEVKRSFRAPKEDDWMLIKKRTEADITGTHKTIGSYIYDALLQEPQQKIIGKLVKTVERKFYKEELNFILQKQCAFHAELQDRDLYMRCIEALYPGNEVQRRNIANRDFIYLLIDDVLFYQRPLKTKKSLIANCPYEENEYVNRKTGEIKTAPLKCIAKSHPLFQEFRLWYFLSNIRVYQKEREVNGTLHLDVDVTTEFLKTEDDYVALFDWLNSRKEIDQKAFLRYPAFGLKKEINNYRWNYVEDKFYPCNETRHAILSRLEKAGIGIDFLSDEKETALWHILYSVSDKQEIEKALATFAVKNGLNESFVEVFKKFPPFKSEYGAYSAKAIKKLLPLMRCGKYWDMSLIDGTTKERIERIIAGECDESIGAKVREKAMNLSDISCFKRLPLWLACYVVYNRHSEDKEITKWETPADIDAYLAAFKQHSLRNPIVEQVITETLRVVRDIWKQVGKIDEIRIELGREMKNPADKRKRMTTQILENENANLRIKALLAEFVNPEYGVENVRPYSPSQQEILRIYEDAVLKGEEQIPEDIDVILKKFNTSKLPTKSEFLRYKLWLEQKYRSPYTGELIPLAKLFTAAYEIEHVIPQSRYFDDSFSNKVICESAVNKLKDNQLGYEFIKNHHGQKVEVGFGKTVEIFSVDSYERFVKEQYAKSGIKMKKLLMDDIPEQFIERQLNDSRYISKVVKGLLSNIVREKNDSGEYEPEAVSKNILVCTGSVTDRLKKDWGMNDVWNSIVSPRFERLNALTETQCFGHWENKDGKKVFQTAVPLEYQKGFSKKRIDHRHHAMDAIVIACATRNHVNYLNNESASRNAKISRYDLQRLLCDKSRGDGNGNYRWIIKKPWTTFTQDAREALSGIIVSLKQNLRIINKTTNIYQHFDANGTRVYEKQKIGDSWAIRKPMHKDTVFGAVNLRKALIPQHYNLTLFISS

SEQ ID NO: 837 - protein, 1504 aa, Bacteroides vulgatus
MKNIVGLDLGTNSIGWAVVNGSVNDDGSEQLVKIQASGSRIIPMDAAMIGDFNKGNSISQTAERTRLRGVRRLSERYLLRRERLHRILDILGFLPFHFAQDLDRHGKIVKGKEPKLAWRKNEAGQFEFIFQDSFKEMLEDFKLNHPNLITDDKKVPYDWTIYYLRKKGLTSKISKEELAWILLNFNQKRGYYQLRGEEEEENKNKLVEFYALKVVAVEDSGEKKGKDIWYNVHLENGWVYRRTSNMPLDWVGKTKEFIVTTDLEKDGTPKKDKEGNVKRSFRAPKEDDWSLLKKKTEADIDQTHKTVGVYIYDTLLGNPSQKIRGRLVRTIERKYYKEELKQILEKQKEFHLELQDRALYAACIEELYPINEAHRNNVGNRDFTYLFLEDILFYQRPLKSKKSLIDNCPYEENQGLDKETGEIKSFPVKCIAKSHPLFQEFRLWQFIVNLRIYRKDLAQDVDVTNELLKTEEDYVALFDWLNGKKEIDQKAFLKYPVFGLKKEIENYRWNYVQDKPYPCNETRSLMLARLEKCDISIEFLTKENEEALWHILYSVEDKNEIVKALQKFADKHDLNASFVDVFQKFPPFKKEYGSYSAKAIKKLLPLMRMGKYWSENSIDKGTRERIDKIITGEYDEKIENRVREKAIHLADVSDFKGLPLWLVCYIVYGRHSEAKEITQWKSPADIDSYLRSFKQHSLRNPIVEQIIIETLRVVRDIWKQVGNIDEIHVELGREMKNPADKRKKMTQQMSENENTNLRIKYLLTEFLNPEYEVENVRPYSPSQQDILRIYEEGVLNSVSDLPEEISDILKKFTETDLKKRPSRSEILRYKLWLEQKYRSPYTGEVIPLGKLFTPAYEIEHVIPQSCYFDDSFSNKVICEAEVNKLKSNLLGHEFIVKHHGEIVELPFGKKVRIFTVDEYEQFVKDNYSRTRSKMKKLLMDDIPEEFVTRQLNDSRYISKVVKSLLSNIVREKGEEEAISKNVIPCTGGVTDRLKKDWGINEVWNKIILPRFQRLNELTGTNKFTTKNVGIQEIPTMPLELQKGFNKKRIDHRHHAMDAIIIACANRNIINYLNNESATAKAELSRYDLQKMLCDKAKTDNNGNYKWVIRKPWASFTQDTYLALENIIVSFKQNLRVINKATNRFLHYNEEGKKIFVKQGKGDNWAIRKSMHKDTVFGEVNLRRIKTVALNEAMKNPQSIVVKDFKRKLLELWNLGFDAKRIKKYFEDNRETWSDINLSKIEVYYFSKDTKDRFFATRKPLDTSFDRKKIENNITDTGIQKILLRHLELKDNNPDIAFSPDGIDEMNRNIIQLNNGKYHQPIIKIRWYEQADKFAVGQTGNKFSKFVEAAKGTNLFFAVYESNILDKKTNTIIKKRNYATIPLNVAIERQKQGLPVAPEDENGNDPIFVLSPNDLVYLPTDDELANGIIAQPLDRGRIYKMVSCTGNEGHFIPARIANPILQTIELGSNNKAQKAWTDEMIKEICMPIKVDRLGNVLESSSSYKK

SEQ ID NO: 838 - protein, 1153 aa, Barnesiella intestinihominis
MKNILGLDLGLSSIGWSVIRENSEEQELVAMGSRVVSLTAAELSSFTQGNGVSINSQRTQKRTQRKGYDRYQLRRTLLRNKLDTLGMLPDDSLSYLPKLQLWGLRAKAVTQRIELNELGRVLLHLNQKRGYKSIKSDFSGDKKITDYVKTVKTRYDELKEMRLTIGELFFRRLTENAFFRCKEQVYPRQAYVEEFDCIMNCQRKFYPDILTDETIRCIRDEIIYYQRPLKSCKYLVSRCEFEKRFYLNAAGKKTEAGPKVSPRTSPLFQVCRLWESINNIVVKDRRNEIVFISAEQRAALFDFLNTHEKLKGSDLLKLLGLSKTYGYRLGEQFKTGIQGNKTRVEIERALGNYPDKKRLLQFNLQEESSSMVNTETGEIIPMISLSFEQEPLYRLWHVLYSIDDREQLQSVLRQKFGIDDDEVLERLSAIDLVKAGFGNKSSKAIRRILPFLQLGMNYAEACEAAGYNHSNNYTKAENEARALLDRLPAIKKNELRQPVVEKILNQMVNVVNALMEKYGRFDEIRVELARELKQSKEERSNTYKSINKNQRENEQIAKRIVEYGVPTRSRIQKYKMWEESKHCCIYCGQPVDVGDFLRGFDVEVEHIIPKSLYFDDSFANKVCSCRSCNKEKNNRTAYDYMKSKGEKALSDYVERVNTMYTNNQISKTKWQNLLTPVDKISIDFIDRQLRESQYIARKAKEILTSICYNVTATSGSVTSFLRHVWGWDTVLHDLNFDRYKKVGLTEVIEVNHRGSVIRREQIKDWSKRFDHRHHAIDALTIACTKQAYIQRLNNLRAEEGPDFNKMSLERYIQSQPHFSVAQVREAVDRILVSFRAGKRAVTPGKRYIRKNRKRISVQSVLIPRGALSEESVYGVIHVWEKDEQGHVIQKQRAVMKYPITSINREMLDKEKVVDKRIHRILSGRLAQYNDNPKEAFAKPVYIDKECRIPIRTVRCFAKPAINTLVPLKKDDKGNPVAWVNPGNNHHVAIYRDEDGKYKERTVTFWEAVDRCRVGIPAIVTQPDTIWDNILQRNDISENVLESLPDVKWQFVLSLQQNEMFILGMNEEDYRYAMDQQDYALLNKYLYRVQKLSKSDYSFRYHTETSVEDKYDGKPNLKLSMQMGKLKRVSIKSLLGLNPHKVHISVLGEIKEIS

SEQ ID NO: 839 - protein, 1352 aa, Belliella baltica
MKKILGLDLGTTSIGWAFIKEPEKDVVGSEIVDMGVRIVPLSSDEENDFAKGNTISINADRTLKRGARRNLQRFKQRRNALLEIFKEKKLISTNFKYAEDGPSSTFSTLNLRAKAAKEKIELQDLVKVLLQINKKRGYKSSRKAKSEEDDGSAIDSMGIAKELYENDLTPGQWVYEALQKGRKNVPDFYRSDLQEEFKKIVNYQSEFFPDIFNASFVEDWMGKASTPTKQYFNKKGVQLAENKGKREERRLQEYKWRAEAVNFKIDLSEIALILSQINSQISNSSGYLGAISDRSKELYFKNLTVGQYLYQQIKKNPHTRLKGQVFYRQDYLDEFERIWSVQSSFYPQLNDALKREVRDITIFFQRRLKSQKHLISNCEFEDHHKVVPKSHPVFQEFRIWQNLNNLLLIKKDNLNEKFDLELESKIALANELAFKRELNVKDALKILGLKPNEWEFNFTKIEGNRTNQAFFDAFAKIIELEDGEPIDLGDLKADDILDQFSEAFLRIGIDTELLQVNSDIEGAEYEKQSYIQFWHLLYSSEDDQKLKLNLIRKFGFKPEHAKILASISLQDDHASLSSRAIKKILPHLQSGLIYDKACTYAGYNHSSSFTKDENEKRELRAELELLKKNSLRNPVVEKILNQMINVVNAILKDPELGRPDEIRVEMARELKANAEQRKNMTSNIASATRDHDKYREILKSEFGLKRVTKNDLLRYKLWLETDGISLYTGKPIEASKLFSKEYDIEHIIPKARLFDDSFSNKTICERQLNIDKANVTAFSFLQNKLSADEFEQYQSRVKSLYGKLSKAKIQKLLMANDKIPEDFIARQLQETRYISKKAKEILFEISRRVSVTTGTITDKLREDWGLVEIMKELNWEKYDKLGLTYTIEGKHGERLNKIKDWSKRNDHRHHAMDALTVALTKPAYIQYLNNLNAKGLNNKKGTEVFAIEQKYLKRENGKLCFIPPIENIRSEAKKHLSRILVSYKAKNKVVTINKNKTKSKAGLNEQIALTPRGQLHKETVYGKSFHYSTKFEKIGASFNVQKINTVAKKEEREALLKRLAENGNDPKKAFTGKNTLNKMPIYLDLGKNIKLSEKVKTVVLEQNYTIRKNIDPDLKVDKVIDVGIKRILESRLEEFGGNAKLAFSNLEENPIWLNKEKGISIKRVKISGVSNVESLHVKKDHFGEPILDQEGNEIPVDFVSTGNNHHVAIYEDENGNLQEEVVSFFEAVVRQNQGLPIIKKNHTLGWKFLFTLKQNEYFVFPSDDFVPADVDLMDEQNYHLISPNLFRVQKIARKNYVFNNHLETKAVDNDLLKSKKELSKITYHFYQTPEHLRGIIKIRINHLGKIIQIGEY

SEQ ID NO: 840 - protein, 1415 aa, Bergeyella zoohelcum
MKHILGLDLGTNSIGWALIERNIEEKYGKIIGMGSRIVPMGAELSKFEQGQAQTKNADRRTNRGARRLNKRYKQRRNKLIYILQKLDMLPSQIKLKEDFSDPNKIDKITILPISKKQEQLTAFDLVSLRVKALTEKVGLEDLGKIIYKYNQLRGYAGGSLEPEKEDIFDEEQSKDKKNKSFIAFSKIVFLGEPQEEIFKNKKLNRRAIIVETEEGNFEGSTFLENIKVGDSLELLINISASKSGDTITIKLPNKTNWRKKMENIENQLKEKSKEMGREFYISEFLLELLKENRWAKIRNNTILRARYESEFEAIWNEQVKHYPFLENLDKKTLIEIVSFIFPGEKESQKKYRELGLEKGLKYIIKNQVVFYQRELKDQSHLISDCRYEPNEKAIAKSHPVFQEYKVWEQINKLIVNTKIEAGTNRKGEKKYKYIDRPIPTALKEWIFEELQNKKEITFSAIFKKLKAEFDLREGIDFLNGMSPKDKLKGNETKLQLQKSLGELWDVLGLDSINRQIELWNILYNEKGNEYDLTSDRTSKVLEFINKYGNNIVDDNAEETAIRISKIKFARAYSSLSLKAVERILPLVRAGKYFNNDFSQQLQSKILKLLNENVEDPFAKAAQTYLDNNQSVLSEGGVGNSIATILVYDKHTAKEYSHDELYKSYKEINLLKQGDLRNPLVEQIINEALVLIRDIWKNYGIKPNEIRVELARDLKNSAKERATIHKRNKDNQTINNKIKETLVKNKKELSLANIEKVKLWEAQRHLSPYTGQPIPLSDLFDKEKYDVDHIIPISRYFDDSFTNKVISEKSVNQEKANRTAMEYFEVGSLKYSIFTKEQFIAHVNEYFSGVKRKNLLATSIPEDPVQRQIKDTQYIAIRVKEELNKIVGNENVKTTTGSITDYLRNHWGLTDKFKLLLKERYEALLESEKFLEAEYDNYKKDFDSRKKEYEEKEVLFEEQELTREEFIKEYKENYIRYKKNKLIIKGWSKRIDHRHHAIDALIVACTEPAHIKRLNDLNKVLQDWLVEHKSEFMPNFEGSNSELLEEILSLPENERTEIFTQIEKFRAIEMPWKGFPEQVEQKLKEIIISHKPKDKLLLQYNKAGDRQIKLRGQLHEGTLYGISQGKEAYRIPLTKFGGSKFATEKNIQKIVSPFLSGFIANHLKEYNNKKEEAFSAEGIMDLNNKLAQYRNEKGELKPHTPISTVKIYYKDPSKNKKKKDEEDLSLQKLDREKAFNEKLYVKTGDNYLFAVLEGEIKTKKTSQIKRLYDIISFFDATNFLKEEFRNAPDKKTFDKDLLFRQYFEERNKAKLLFTLKQGDFVYLPNENEEVILDKESPLYNQYWGDLKERGKNIYVVQKFSKKQIYFIKHTIADIIKKDVEFGSQNCYETVEGRSIKENCFKLEIDRLGNIVKVIKR

SEQ ID NO: 841 - protein, 1430 aa, Bergeyella zoohelcum
MKHILGLDLGTNSIGWAVVKEAQNDNEQSEIVDVGVRVNPLTTDEKTNFEKGKPISTNADRTLKRSARRNLQRYKLRRKELIELLKEHQLISTDTILTENGKGTTFQTLELRAKSAKEKISLEELARVFLTINKKRGYKSSRKAKNEDEGQLIDGMEIAKRLYEENLTTGQLSLQLLKEGKKSLPDYYRSDLQFELDKVWNFQKQFHSDILTDEFYAQLKGKGQRATSALFLAKYQIYTAENKGSREDKKLQAYQWRVDALSKELTREQLAFVITEINNNLNNSSGYLGAISDRSKELYFNNETVGEYLWKQIAANPHTSLKNQVFYRQDYLDEFEQIWKTQSAFYPEILTDELKKELRDVVIFYQRKLKSQKSLVSFCEFENKEIEIKKEDGTSTKKVIGLKVAPKSSPLFQEFKIWQNLNNVLIRKKGSKTKKVAKNQQAVLFEEEKTISELDLEAKQALFNELNLKGNLKADYCLEILGYSPKEWEMNYSVLEGNRTNKALYEAYLKITDLEGYDAKNHLKVKLNKDEVELDDLKVPASEIKDMVQAIFKEAGINTDILHFNAELDGKDFENQASYQLWHLLYSYEGDDSKSGNELLYKLLETKFGFKKEYAQILANVSLSDDYGSLSTKAMRKIHPYIKENKFSTACELAGYRHSKHSLTKEENDNRVLKDSLEVLKKNSLRQPVVEKILNQMINLVNALLKKYRTENPNFKFDEIRIELARELKKNAEERANMTANINKAKTEHEKIIKILKNEFGLPNPTRNDIIRYRLYEELKANGYKDLYTNIKIPQEKLFTKEIDIEHIIPKSRVFDDSFSNKTLSFRKTNLDKGERTAFDYMESKFGADKLEEYVARVEDLYKNNIISKAKYQKLLKKESEIGDGFVERDLRETQYIAKKAKEILLQITPNVLSTSGGITDRLREDWDLINVMKELNLPKYRALGLTQMEDRKYGQQVEVITDWTKRNDHRHHAMDALTVAFTKHNHIQYLNYLNARKNEKHKEHSNIMGIQQLETIKVTDKNGNEKRVFKAPMPNFRQVTKAFLENILISHKAKNKVVTKNKNKVAGSNKVQEVLTPRGQLHKETVYGKYQYYVQKEEKIGAKFDLETIKKVANPLYQSLLKKRLEENGGDPKKAFTGKNSLAKNPIYLDDTQTEQLPEKVKLVWLENSFSIRKDITPENFKDEKLIDKILDEGVKRILKERLQSFGNDAKKAFSDLDKNPIWLNKEKGITIKRVTISGVANAEPLHTKKDHLGKEILDKEGKPIPVDFISTGSNHHVAVYRDEKGNLQEKVVSVFEAVVRANQGLPIIDKTYNQHLGWEFLFTMKQNEMFVFPNESTGFNPNDIDLLDPKNKRIISPNLFRVQKFSKLQYGNSFVREFVFRHHLETTVEDRKELQGITYKQMKNSTFFNDIIKVRINHLGDIVSIGEY

SEQ ID NO: 842 - protein, 1281 aa, Bifidobacterium bifidum
MEDDSQHDIREIYLAIHHMVKYRGNFLVEGTLESSNAFKEDELLKLLGRITRYEMSEGEQNSDIEQDDENKLVAPANGQLADALCATRGSRSMRVDNALEALSAVNDLSREQRAIVKAIFAGLEGNKLDLAKIFVSKEFSSENKKILGIYFNKSDYEEKCVQIVDSGLLDDEEREFLDRMQGQYNAIALKQLLGRSTSVSDSKCASYDAHRANWNLIKLQLRTKENEKDINENYGILVGWKIDSGQRKSVRGESAYENMRKKANVFFKKMIETSDLSETDKNRLIHDIEEDKLFPIQRDSDNGVIPHQLHQNELKQIIKKQGKYYPFLLDAFEKDGKQINKIEGLLAFRVPYFVGPLVVPEDLQKSDNSENHWMVRKKKGEITPWNFDEMVDKDASGRKFIERLVGTDSYLLGEPTLPKNSLLYQEYEVLNELNNVRLSVRTGNHWNDKRRMRLGREEKTLLCQRLFMKGQTVTKRTAENLLRKEYGRTYELSGLSDESKFTSSLSTYGKMCRIFGEKYVNEHRDLMEKIVELQTVFEDKETLLHQLRQLEGISEADCALLVNTHYTGWGRLSRKLLTTKAGECKISDDFAPRKHSIIEIMRAEDRNLMEIITDKQLGFSDWIEQENLGAENGSSLMEVVDDLRVSPKVKRGIIQSIRLIDDISKAVGKRPSRIFLELADDIQPSGRTISRKSRLQDLYRNANLGKEFKGIADELNACSDKDLQDDRLFLYYTQLGKDMYTGEELDLDRLSSAYDIDHIIPQAVTQNDSIDNRVLVARAENARKTDSFTYMPQIADRMRNFWQILLDNGLISRVKFERLTRQNEFSEREKERFVQRSLVETRQIMKNVATLMRQRYGNSAAVIGLNAELTKEMHRYLGFSHKNRDINDYHHAQDALCVGIAGQFAANRGFFADGEVSDGAQNSYNQYLRDYLRGYREKLSAEDRKQGRAFGFIVGSMRSQDEQKRVNPRTGEVVWSEEDKDYLRKVMNYRKMLVTQKVGDDFGALYDETRYAATDPKGIKGIPFDGAKQDTSLYGGFSSAKPAYAVLIESKGKTRLVNVTMQEYSLLGDRPSDDELRKVLAKKKSEYAKANILLRHVPKMQLIRYGGGLMVIKSAGELNNAQQLWLPYEEYCYFDDLSQGKGSLEKDDLKKLLDSILGSVQCLYPWHRFTEEELADLHVAFDKLPEDEKKNVITGIVSALHADAKTANLSIVGMTGSWRRMNNKSGYTFSDEDEFIFQSPSGLFEKRVTVGELKRKAKKEVNSKYRTNEKRLPTLSGASQP

SEQ ID NO: 843 - protein, 1121 aa, Bifidobacterium dentium
MSVGLAAIEVDETGFPIRILNIQSVIHDGGIDPQLGKKKSISRKAISGVARRTRRMRRRKVVRLRQLDATLESLGFPIVEPDSLDTWEIWLTRAKLASSYIQDDETRKEDVSIALRHIARHRGWRNPYSNVESLFVDVAPSEQYEELRRKAEEKLGTSLSGNPTSAEIVECILKRQVGEVQLRTRSRKGVNGNAVEKEGLLPTKLMQSDNAAEIRRIFKVQRIDDETGRKLLRAVFKACSPKGSVERRVGRDALAPGLPRALKASLAFQEYRIANVLTNLVISEDGTKRKLTIAEKQRVFGFLSSNETDDITWIDVAEKLGLERRQIQGVGCLTADGEERISSTPPRNITALHIHSAKPVIREKLVAWWKAASPTVRETMVELLSNTVDIDRVREDMDYSSAVAFIDSLGDEELTALDSVDLLSGRAAYSRQTLKQLTERMLNTDDDLHEARKAVFGVDDNWKPPVDAISTSVGNPAVDRVLKIVNRYLLACQKRWRNPQSVQIEHVRESFSSVAKAKETERVQGERARYRNDLRRELCEQEGLNKIRESDIRRWESVQRQNGTCLYCGSPITFRTCEMDHIVPRKGVGSTNTRVNLAAACAACNKLKSNTAFSVWARTEGAANRKVSQRDAIERVKTFIFNKSVPPREQRAFKQAVISRLRQAESDPAIDNRSIESVAWMADELHRRIEAYFNQDADVSGNTPATQVWVFQGRVTALARKASGIEGRIHFAGEWKKTRLDRRHHAVDAAVIAMMNHSAAQTLVERDSLRLSQWITRKPETWKNYPFSEGQKKTRFKEWLDCMNALLDLLNDALDSDRVPVTRCQRMSLGNSQAHAATIRKMKRVELFSPMDADLIRRASTPALYCALTRLPEYSPEKGLPENRGREIVLNGRHIRSTETVDFFASGAAQLMVRNGSAEIGDSIHHMRIYRYRKTGAKSQEYVYGMIRVFQIDLLHASSENLFAVQLPSQSVSVRYGDKNVVQAIQEGRAEYLGHIVPNDEILISYEGVRMKDSEKIGAYANDFSGTASELAQRRHWVVVGSDVSKLALRPSYLSEEGLENSGSESERLSKQTRKVIEGKGWVVAVNILAKYHPVVIRRNALGEPRFRTNSGMPVSWRWDR

SEQ ID NO: 844 - protein, 354 aa, Bifidobacterium longum
AKQYVNSASIDDAEAETMKTTVSVFQGRVTASARRAAGIEGKIHFIGQQSKTRLDRRHHAVDASVIAMMNTAAAQTLMERESLRESQRLIGLMPGERSWKEYPYEGTSRYESFHLWLDNMDVLLELLNDALDNDRIAVMQSQRYVLGNSIAHDATIHPLEKVPLGSAMSADLIRRASTPALWCALTRLPDYDEKEGLPEDSHREIRVHDTRYSADDEMGFFASQAAQIAVQEGSADIGSAIHHARVYRCWKTNAKGVRKYFYGMIRVFQTDLLRACHDDLFTVPLPPQSISMRYGEPRVVQALQSGNAQYLGSLVVGDEIEMDFSSLDVDGQIGEYLQFFSQFSGGNLAWKHWV

SEQ ID NO: 845 - protein, 1124 aa, Bifidobacterium longum
LTGHSGHTFWPTSSSPPIQLEQEKRPLPQRNTSQNGHTFWPITRERCFMRGKRYRIGIDVGLNSVGLAAVEVSDENSPVRLLNAQSVIHDGGVDPQKNKEAITRKNMSGVARRTRRMRRRKRERLHKLDMLLGKFGYPVIEPESLDKPFEEWHVRAELATRYIEDDELRRESISIALRHMARHRGWRNPYRQVDSLISDNPYSKQYGELKEKAKAYNDDATAAEEESTPAQLVVAMLDAGYAEAPRLRWRTGSKKPDAEGYLPVRLMQEDNANELKQIFRVQRVPADEWKPLFRSVFYAVSPKGSAEQRVGQDPLAPEQARALKASLAFQEYRIANVITNLRIKDASAELRKLTVDEKQSIYDQLVSPSSEDITWSDLCDFLGFKRSQLKGVGSLTEDGEERISSRPPRLTSVQRIYESDNKIRKPLVAWWKSASDNEHEAMIRLLSNTVDIDKVREDVAYASAIEFIDGLDDDALTKLDSVDLPSGRAAYSVETLQKLTRQMLTTDDDLHEARKTLFNVTDSWRPPADPIGEPLGNPSVDRVLKNVNRYLMNCQQRWGNPVSVNIEHVRSSFSSVAFARKDKREYEKNNEKRSIFRSSLSEQLRADEQMEKVRESDLRRLEAIQRQNGQCLYCGRTITFRTCEMDHIVPRKGVGSTNTRTNFAAVCAECNRMKSNTPFAIWARSEDAQTRGVSLAEAKKRVTMFTFNPKSYAPREVKAFKQAVIARLQQTEDDAAIDNRSIESVAWMADELHRRIDWYFNAKQYVNSASIDDAEAETMKTTVSVFQGRVTASARRAAGIEGKIHFIGQQSKTRLDRRHHAVDASVIAMMNTAAAQTLMERESLRESQRLIGLMPGERSWKEYPYEGTSRYESFHLWLDNMDVLLELLNDALDNDRIAVMQSQRYVLGNSIAHDATIHPLEKVPLGSAMSADLIRRASTPALWCALTRLPDYDEKEGLPEDSHREIRVHDTRYSADDEMGFFASQAAQIAVQEGSADIGSAIHHARVYRCWKTNAKGVRKYFYGMIRVFQTDLLRACHDDLFTVPLPPQSISMRYGEPRVVQALQSGNAQYLGSLVVGDEIEMDFPVSMLMVRLASIYNSSRSLVEGTLHGNIGLLMDSLTRRS

SEQ ID NO: 846 - protein, 166 aa, Bifidobacterium longum
MGLAAVEVSDENSPVRLLNAQSVIHDGGVDPQKNKEAITRKNMSGVARRTRRMRRRKRERLHKLDMLLGKFGYPVIEPESLDKPFEEWHVRAELATRYIEDDELRRESISIALRHMARHRGWRNPYRQVDSLISDNPYSKQYGELKEKAKAYNDDATAAEEESTPA

SEQ ID NO: 847 - protein, 1138 aa, Bifidobacterium longum
MNSVGLAAVEVSDENSPVRLLNAQSVIHDGGVDPQKNKEAITRKNMSGVARRTRRMRRRKRERLHKLDMLLGKFGYPVIEPESLDKPFEEWHVRAELATRYIEDDELRRESISIALRHMARHRGWRNPYRQVDSLISDNPYSKQYGELKEKAKAYNDDATAAEEESTPAQLVVAMLDAGYAEAPRLRWRTGSKKPDAEGYLPVRLMQEDNANELKQIFRVQRVPADEWKPLFRSVFYAVSPKGSAEQRVGQDPLAPEQARALKASLAFQEYRIANVITNLRIKDASAELRKLTVDEKQSIYDQLVSPSSEDITWSDLCDFLGFKRSQLKGVGSLTEDGEERISSRPPRLTSVQRIYESDNKIRKPLVAWWKSASDNEHEAMIRLLSNTVDIDKVREDVAYASAIEFIDGLDDDALTKLDSVDLPSGRAAYSVETLQKLTRQMLTTDDDLHEARKTLFNVTDSWRPPADPIGEPLGNPSVDRVLKNVNRYLMNCQQRWGNPVSVNIEHVRSSFSSVAFARKDKREYEKNNEKRSIFRSSLSEQLRADEQMEKVRESDLRRLEAIQRQNGQCLYCGRTITFRTCEMDHIVPRKGVGSTNTRTNFAAVCAECNRMKSNTPFAIWARSEDAQTRGVSLAEAKKRVTMFTFNPKSYAPREVKAFKQAVIARLQQTEDDAAIDNRSIESVAWMADELHRRIDWYFNAKQYVNSASIDDAEAETMKTTVSVFQGRVTASARRAAGIEGKIHFIGQQSKTRLDRRHHAVDASVIAMMNTAAAQTLMERESLRESQRLIGLMPGERSWKEYPYEGTSRYESFHLWLDNMDVLLELLNDALDNDRIAVMQSQRYVLGNSIAHDATIHPLEKVPLGSAMSADLIRRASTPALWCALTRLPDYDEKEGLPEDSHREIRVHDTRYSADDEMGFFASQAAQIAVQEGSADIGSAIHHARVYRCWKTNAKGVRKYFYGMIRVFQTDLLRACHDDLFTVPLPPQSISMRYGEPRVVQALQSGNAQYLGSLVVGDEIEMDFSSLDVDGQIGEYLQFFSQFSGGNLAWKHWVVDGFFNQTQLRIRPRYLAAEGLAKAFSDDVVPDGVQKIVTKQGWLPPVNTASKTAVRIVRRNAFGEPRLSSAHHMPCSWQWRHE

SEQ ID NO: 848 - protein, 182 aa, Bifidobacterium longum
MRGKRYRIGIDVGLNSVGLAAVEVSDENSPVRLLNAQSVIHDGGVDPQKNKEAITRKNMSGVARRTRRMRRRKRERLHKLDMLLGKFGYPVIEPESLDKPFEEWHVRAELATRYIEDDELRRESISIALRHMARHRGWRNPYRQVDSLISDNPYSKQYGELKEKAKAYNDDATAAEEESTPA

SEQ ID NO: 849 - protein, 441 aa, Bifidobacterium longum
MVAMLDAGYAEAPRLRWRTGSKKPDAEGYLPVRLMQEDNANELKQIFRVQRVPADEWKPLFRSVFYAVSPKGSAEQRVGQDPLAPEQARALKASLAFQEYRIANVITNLRIKDASAELRKLTVDEKQSIYDQLVSPSSEDITWSDLCDFLGFKRSQLKGVGSLTEDGEERISSRPPRLTSVQRIYESDNKIRKPLVAWWKSASDNEHEAMIRLLSNTVDIDKVREDVAYASAIEFIDGLDDDALTKLDSVDLPSGRAAYSVETLQKLTRQMLTTDDDLHEARKTLFNVTDSWRPPADPIGEPLGNPSVDRVLKNVNRYLMNCQQRWGNPVSVNIEHVRSSFSSVAFARKDKREYEKNNEKRSIFRSSLSEQLRADEQMEKVRESDLRRLEAIQRQNGQCLYCGRTITFRTCEMDHIVPRKGVGSTNTRTNFAAVCAECNRM

SEQ ID NO: 850 - protein, 967 aa, Bifidobacterium longum
MVAMLDAGYAEAPRLRWRTGSKKPDAEGYLPVRLMQEDNANELKQIFRVQRVPADEWKPLFRSVFYAVSPKGSAEQRVGQDPLAPEQARALKASLAFQEYRIANVITNLRIKDASAELRKLTVDEKQSIYDQLVSPSSEDITWSDLCDFLGFKRSQLKGVGSLTEDGEERISSRPPRLTSVQRIYESDNKIRKPLVAWWKSASDNEHEAMIRLLSNTVDIDKVREDVAYASAIEFIDGLDDDALTKLDSVDLPSGRAAYSVETLQKLTRQMLTTDDDLHEARKTLFNVTDSWRPPADPIGEPLGNPSVDRVLKNVNRYLMNCQQRWGNPVSVNIEHVRSSFSSVAFARKDKREYEKNNEKRSIFRSSLSEQLRADEQMEKVRESDLRRLEAIQRQNGQCLYCGRTITFRTCEMDHIVPRKGVGSTNTRTNFAAVCAECNRMKSNTPFAIWARSEDAQTRGVSLAEAKKRVTMFTFNPKSYAPREVKAFKQAVIARLQQTEDDAAIDNRSIESVAWMADELHRRIDWYFNAKQYVNSASIDDAEAETMKTTVSVFQGRVTASARRAAGIEGKIHFIGQQSKTRLDRRHHAVDASVIAMMNTAAAQTLMERESLRESQRLIGLMPGERSWKEYPYEGTSRYESFHLWLDNMDVLLELLNDALDNDRIAVMQSQRYVLGNSIAHDATIHPLEKVPLGSAMSADLIRRASTPALWCALTRLPDYDEKEGLPEDSHREIRVHDTRYSADDEMGFFASQAAQIAVQEGSADIGSAIHHARVYRCWKTNAKGVRKYFYGMIRVFQTDLLRACHDDLFTVPLPPQSISMRYGEPRVVQALQSGNAQYLGSLVVGDEIEMDFSSLDVDGQIGEYLQFFSQFSGGNLAWKHWVVDGFFNQTQLRIRPRYLAAEGLAKAFSDDVVPDGVQKIVTKQGWLPPVNTASKTAVRIVRRNAFGEPRLSSAHHMPCSWQWRHE

SEQ ID NO: 851 - protein, 1151 aa, Bifidobacterium sp.
MRGKRYRIGIDVGLNSVGLAAVEVSDENSPVRLLNAQSVIHDGGVDPQKNKEAITRKNMSGVARRTRRMRRRKRERLHKLDMLLGKFGYPVIEPESLDKPFEEWHVRAELATRYIEDDELRRESISIALRHMARHRGWRNPYRQVDSLISDNPYSKQYGELKEKAKAYNDDATAAEEESTPAQLVVAMLDAGYAEAPRLRWRTGSKKPDAEGYLPVRLMQEDNANELKQIFRVQRVPADEWKPLFRSVFYAVSPKGSAEQRVGQDPLAPEQARALKASLAFQEYRIANVITNLRIKDASAELRKLTVDEKQSIYDQLVSPSSEDITWSDLCDFLGFKRSQLKGVGSLTEDGEERISSRPPRLTSVQRIYESDNKIRKPLVAWWKSASDNEHEAMIRLLSNTVDIDKVREDVAYASAIEFIDGLDDDALTKLDSVDLPSGRAAYSVETLQKLTRQMLTTDDDLHEARKTLFNVTDSWRPPADPIGEPLGNPSVDRVLKNVNRYLMNCQQRWGNPVSVNIEHVRSSFSSVAFARKDKREYEKNNEKRSIFRSSLSEQLRADEQMEKVRESDLRRLEAIQRQNGQCLYCGRTITFRTCEMDHIVPRKGVGSTNTRTNFAAVCAECNRMKSNTPFAIWARSEDAQTRGVSLAEAKKRVTMFTFNPKSYAPREVKAFKQAVIARLQQTEDDAAIDNRSIESVAWMADELHRRIDWYFNAKQYVNSASIDDAEAETMKTTVSVFQGRVTASARRAAGIEGKIHFIGQQSKTRLDRRHHAVDASVIAMMNTAAAQTLMERESLRESQRLIGLMPGERSWKEYPYEGTSRYESFHLWLDNMDVLLELLNDALDNDRIAVMQSQRYVLGNSIAHDATIHPLEKVPLGSAMSADLIRRASTPALWCALTRLPDYDEKEGLPEDSHREIRVHDTRYSADDEMGFFASQAAQIAVQEGSADIGSAIHHARVYRCWKTNAKGVRKYFYGMIRVFQTDLLRACHDDLFTVPLPPQSISMRYGEPRVVQALQSGNAQYLGSLVVGDEIEMDFSSLDVDGQIGEYLQFFSQFSGGNLAWKHWVVDGFFNQTQLRIRPRYLAAEGLAKAFSDDVVPDGVQKIVTKQGWLPPVNTASKTAVRIVRRNAFGEPRLSSAHHMPCSWQWRHE

SEQ ID NO: 852 - protein, 1092 aa, Brevibacillus laterosporus
MAYTMGIDVGIASCGWAIVDLERQRIIDIGVRTFEKAENPKNGEALAVPRREARSSRRRLRRKKHRIERLKYMFVRNGLAVDIQHLEQTLRSQNEIDVWQLRVDGLDRMLTQKEWLRVLIHLAQRRGFQSNRKTDGSSEDGQVLVNVTENDRLMEEKDYRTVAEMMVKDEKFSDHKRNKNGNYHGVVSRASLLVEIHTLFESQRQHHNFLASKDFELEYINIWSSQRPVATKDQIEKMIGTCTFLPKEKRAPKASWHFQYFMLLQTINHIRITNAQGTRPLNKEEIEQVVNMALTKSKVSYHDIRKVLDLSEEYQFVGLDYGKEDEKKKVESKETIIKLDDYHKLNKIFNEVELAKGETWEAVDYDTVAYALTFFKDDEDIRDYLQNKYKDSKNRLVKNVANKEYTNELIEKVSTLSFRKVGHLSLKALRKIIPFLEQGMTYDKACQAAGFNFQGISKKKRSVVLPVIDQISNPVVNRALTQTRKVINALIKKYGSPETIHIETARELSKRFDERKNITKDYKENRDKNERAKKHLSELGIINPTGLDIVKYKLWCEQQGRCMYSNQPISFERLRESGYTEVDHIIPYSRSMNDSYNNRVLVMTRENREKSNQTPYEYMGNDTQRWDEFEQRVTTNPQIKKEKRQNLLLKGFTNRRELEMLERNLNDTRHITKYLSHFISTNLEFSPSDKKKKVVNTSGRITSHLRSRWGLEKNREQNDLHHAMDAVVIAVTSDSFIQQVTNYYKRKERRELNGDDKFPLPWKFFREEVIARLSPNPKEQIEALPNHFYSEDELADLQPIFVSRMPKRSITGEAHQAQFRRVVGKTKEGKNITAKKTALVDISYDKNGDFNMYGRETDPATYEAIKERYLEFGGNAKKAFSTDLHKPKKDGTKGPLIKSVRIMENKTLVHPVNKGKGVVYNSSIVRTDVFQRKEKYYLLPVYVTDVTKGKLPNKVIAAKKGYDDWIEVDDSFTFLYSLYPNDLIFIRQNPKKKISLKKRIESHSISDSKEVQEILTYYKGVDSSTAAIEFITHDGSYYAKGVGVQNLDCFEKYQVDILGNYSKVKGEKRLELETSDNNHKGKDVNSIKSTSR

SEQ ID NO: 853 - protein, 103 aa, Butyrivibrio fibrisolvens
MISVGQSRKDLEDLGYEFKLSFYKEDIIEYEKNGDILVERFLSRTMPQVRNYIETKPIDRPKYDKRNPVGLSKTSSIRKITMDILGNRFYVDKMSFNNVVGTQ

SEQ ID NO: 854 - protein, 177 aa, Butyrivibrio fibrisolvens
MLIAFSQMGYDAYHELTNKYIDFETGEIIDKEGFNELLNNDLVYKNTMYESKWLKIKGNIEKAAEKNKYWYQVNKKCNRGLCNQTVYGTRESDGDVYKISKIDIRTDDGFKKFKNIVDKGNESVFLMYENDPKTFELIMDIYKNYSDSKNPFVQYEKETGDIIRKYSKKITGQRFLN

SEQ ID NO: 855 - protein, 1442 aa, Caenispirillum salinarum
MPVLSPLSPNAAQGRRRWSLALDIGEGSIGWAVAEVDAEGRVLQLTGTGVTLFPSAWSNENGTYVAHGAADRAVRGQQQRHDSRRRRLAGLARLCAPVLERSPEDLKDLTRTPPKADPRAIFFLRADAARRPLDGPELFRVLHHMAAHRGIRLAELQEVDPPPESDADDAAPAATEDEDGTRRAAADERAFRRLMAEHMHRHGTQPTCGEIMAGRLRETPAGAQPVTRARDGLRVGGGVAVPTRALIEQEFDAIRAIQAPRHPDLPWDSLRRLVLDQAPIAVPPATPCLFLEELRRRGETFQGRTITREAIDRGLTVDPLIQALRIRETVGNLRLHERITEPDGRQRYVPRAMPELGLSHGELTAPERDTLVRALMHDPDGLAAKDGRIPYTRLRKLIGYDNSPVCFAQERDTSGGGITVNPTDPLMARWIDGWVDLPLKARSLYVRDVVARGADSAALARLLAEGAHGVPPVAAAAVPAATAAILESDIMQPGRYSVCPWAAEAILDAWANAPTEGFYDVTRGLFGFAPGEIVLEDLRRARGALLAHLPRTMAAARTPNRAAQQRGPLPAYESVIPSQLITSLRRAHKGRAADWSAADPEERNPFLRTWTGNAATDHILNQVRKTANEVITKYGNRRGWDPLPSRITVELAREAKHGVIRRNEIAKENRENEGRRKKESAALDTFCQDNTVSWQAGGLPKERAALRLRLAQRQEFFCPYCAERPKLRATDLFSPAETEIDHVIERRMGGDGPDNLVLAHKDCNNAKGKKTPHEHAGDLLDSPALAALWQGWRKENADRLKGKGHKARTPREDKDFMDRVGWRFEEDARAKAEENQERRGRRMLHDTARATRLARLYLAAAVMPEDPAEIGAPPVETPPSPEDPTGYTAIYRTISRVQPVNGSVTHMLRQRLLQRDKNRDYQTHHAEDACLLLLAGPAVVQAFNTEAAQHGADAPDDRPVDLMPTSDAYHQQRRARALGRVPLATVDAALADIVMPESDRQDPETGRVHWRLTRAGRGLKRRIDDLTRNCVILSRPRRPSETGTPGALHNATHYGRREITVDGRTDTVVTQRMNARDLVALLDNAKIVPAARLDAAAPGDTILKEICTEIADRHDRVVDPEGTHARRWISARLAALVPAHAEAVARDIAELADLDALADADRTPEQEARRSALRQSPYLGRAISAKKADGRARAREQEILTRALLDPHWGPRGLRHLIMREARAPSLVRIRANKTDAFGRPVPDAAVWVKTDGNAVSQLWRLTSVVTDDGRRIPLPKPIEKRIEISNLEYARLNGLDEGAGVTGNNAPPRPLRQDIDRLTPLWRDHGTAPGGYLGTAVGELEDKARSALRGKAMRQTLTDAGITAEAGWRLDSEGAVCDLEVAKGDTVKKDGKTYKVGVITQGIFGMPVDAAGSAPRTPEDCEKFEEQYGIKPWKAKGIPLA

SEQ ID NO: 856 - protein, 984 aa, Campylobacter coli
MARILAFDIGISSIGWAFSENDELKDCGVRIFTKAENPKTGESLALPRRLARSARKCLARRKARLNHLKHLIANEFKLNYEDYQSFDESLAKAYKGSLISPYELRFRALNELLSKQDFARVILHIAKRRGYDDIKNNGDEEKSEILKAIKQNEEKLVNYQSVGEYLYKEYFQKFKENSKEFINVRNKKESYERCIAQSFLKDELKLIFQKQREFGFSFSKKFEEEVLSVAFYKRALKDFSHLVGNCSFFTDEKRAPKNSPLAFMFVALTRIINLLNNLKNTEGILYTKDDLNALLNEVLKNGTLTYKQTKKLLGLSDDYEFKGEKGTYFIEFKKYKEFIKALGEHNLSQDDLNEIAKDITLIKDEIKLKKALAKYDLNQNQIDSLSKLEFKDHLNISFKALKLITPLMLEGKKYDEACNELNLKVAINEDKKDFLPAFNETYYKDEVTNPVVLRAIKEYRKVLNALLKKYGKVHKINIELAREVGKNHSQRAKIEKEQNENYKAKKDAELECEKLGLKINSKNILKLRLFKEQKEFCAYSGEKIKISDLQDEKMLEIDHIYPYSRSFDDSYMNKVLVFTKQNQEKLNQTPFEAFGNDSAKWQKIEVLAKNLPTKKQKRILDKNYKDKEQKNFKDRNLNDTRYIARLVLNYTKDYLDFLPLSDDENTKLNDTQKGSKVHVEAKSGMLTSALRHTWGFSAKDRNNHLHHAIDAVIIAYANNSIVKAFSDFKKEQESNSAELYAKKISELDYKNKRKFFEPFSGFRQKVLDKIDEIFVSKPERKKPSGALHEETFRKEEEFYQSYGGKEGVLKALELGKIRKVNGKIVKNGDMFRVDIFKHKKTNKFYAVPIYTMDFALKVLPNKAVARSKKGEIKDWILMDENYEFCFSLYKDSLILIQTKDMQEPEFVYYNAFTSSTVSLIVSKHDNKFETLSKNQKILFKNANEKEVIAKSIGIQNLKVFEKYIVSALGEVTKAEFRQREDFKK

SEQ ID NO: 857 - protein, 984 aa, Campylobacter coli
MARILAFDIGISSIGWAFSENDELKDCGVRIFTKAENPKTGESLALPRRLARSARKRLARRKARLNHLKHLIANEFKLNYEDYQSFDESLAKAYKGSLISPYELRFRALNELLSKQDFARVILHIAKRRGYDDIKNNGDEEKGKILKAIKQNEEKLVNYQSVGEYLYKEYFQKFKENSKEFINVRNKKESYERCITQSFLKYELKLIFQKQREFGFSFSKKFEEEVLSVAFYKRALKDFSHLVGNCSFFSDEKRAPKNSPLAFMFVALTRIINLLNNLKNTEGILYTKDDLNALLNEVLKNGTLTYKQTKKLLGLSDDYEFKGEKGTYFIEFKKYKEFIKALGEHNLSQDDLNEIAKDITLIKDEIKLKKALAKYDLNQNQIDSLSKLEFKDHLNISFKALKLITPLMLEGKKYDEACNELNLKVAINEDKKDFLPAFNETYYKDEVTNPVVLRAIKEYRKVLNALLKKYGKVHKINIELAREVGKNYSQRAKIEKEQNENYKAKKDAELECEKLGLKINSKNILKLRLFKEQKEFCAYSGEKIKISDLQDEKMLEIDHIYPYSRSFDDSYMNKVLVFTKQNQEKLNQTPFEAFGNDSAKWQKIEVLAKNLPTKKQKRILDKNYKDKEQKNFKDRNLNDTRYIARLVLNYTKDYLDFLPLSDDENTKLNDTQKGSKVHVEAKSGMLTSALRHTWGFSAKDRNNHLHHAIDAVIIAYANNSIVKAFSDFKKEQESNSAELYAKKISELDYKNKRKFFEPFSGFRQKVLDKIDEIFVSKPERKKPSGALHEETFRKEEEFYQSYGGKEGVLKALELGKIRKVNGKIVKNGDMFRVDIFKHKKTNKFYAVPIYTMDFALKVLPNKAVARSKKGEIKDWILMDENYEFCFSLYKDSLILIQTKDMQEPEFVYYNAFTSSTVSLIVSKHDNKFETLSKNQKILFKNANEKEVIAKSIGIQNLKVFEKYIVSALGEVTKAEFRQREDFKK

SEQ ID NO: 858 - protein, 984 aa, Campylobacter coli
MARILAFDIGISSIGWAFSENDELKDCGVRIFTKAENPKTGESLALPRRLARSARKRLARRKARLNHLKHLIANEFKLNYEDYQSFDESLAKAYKGSLISPYELRFRALNELLSKQDFARVILHIAKRRGYDDIKNNGDEEKSEILKAIKQNEEKLVNYQSVGEYLYKEYFQKFKENSKEFINVRNKKESYERCIAQSFLKDELKLIFQKQREFGFSFSKKFEEEVLSVAFYKRALKDFSHLVGNCSFFTDEKRAPKNSPLAFMFVALTRIINLLNNLKNTEGILYTKDDLNTLLNEVLKNGTLTYKQTKKLLGLSDDYEFKGEKGTYFIEFKKYKEFIKALGEHNLSQDNLNEIAKDITLIKDEIKLKKALAKYDLNQNQIDSLSKLEFKDHLNISFKALKLITPLMLEGKKYDEAYNELNLKVAINEDKKDFLPAFNETYYKDEVTNPVVLRAIKEYRKVLNALLKKYGKVHKINIELAREVGKNHSQRAKIEKEQNENYKAKKDAELECEKLGLKINSKNILKLRLFKEQKEFCAYSGEKIKISDLQDEKMLEIDHIYPYSRSFDDSYMNKVLVFTKQNQEKLNQTPFEAFGNDSAKWQKIEVLAKNLPTKKQKRILDKNYKDKEQKDFKDRNLNDTRYIARLVLNYTKDYLDFLPLSDDENTKLNDTQKGSKVHVEAKSGMLTSALRHTWGFSAKDRNNHLHHAIDAVIIAYANNSIVKAFSDFKKEQESNSAELYAKKISELDYKNKRKFFEPFSGFRQKVLDKIDEIFVSKPERKKPSGALHEETFRKEEEFYQSYGGKEGVLKALELGKIRKVNGKIVKNGDMFRVDIFKHKKTNKFYAVPIYTMDFALKVLPNKAVARSKKGEIKDWILMDENYEFCFSLYKDSLILIQTKDMQEPELVYFNAFTSSTVSLIVSKHDNKFETLSKNQKILFKNANEKEVIAKSIGIQNLKVFEKYIVSALGEVTKAEFRQREDFKK

SEQ ID NO: 859 - protein, 984 aa, Campylobacter coli
MARILAFDIGISSIGWAFSENDELKDCGVRIFTKAENPKTGESLALPRRLARSARKRLARRKARLNHLKHLIANEFKLNYEDYQSFDESLAKAYKGSLISPYELRFRALNELLSKQDFARVILHIAKRRGYDDIKNNGDEEKSEILKAIKQNEEKLVNYQSVGEYLYKEYFQKFKENSKEFINVRNKKESYERCIAQSFLKDELKLIFQKQREFGFSFSKKFEEEVLSVAFYKRALKDFSHLVGNCSFFTDEKRAPKNSPLAFMFVALTRIINLLNNLKNTEGILYTKDDLNALLNEVLKNGTLTYKQTKKLLGLSDDYEFKGEKGTYFIEFKKYKEFIKALGEHNLSQDDLNEIAKDITLIKDEIKLKKALAKYDLNQNQIDSLSKLEFKDHLNISFKALKLITPLMLEGKKYDEACNELNLKVAINEDKKDFLPAFNETYYKDEVTNPVVLRAIKEYRKVLNALLKKYGKVHKINIELAREVGKNYSQRAKIEKEQNENYKAKKDAELECEKLGLKINSKNILKLRLFKEQKEFCAYSGEKIKISDLQDEKMLEIDHIYPYSRSFDDSYMNKVLVFTKQNQEKLNQTPFEAFGNDSAKWQKIEVLAKNLPTKKQKRILDKNYKDKEQKNFKDRNLNDTRYIARLVLNYTKDYLDFLPLSDDENTKLNDTQKGSKVHVEAKSGMLTSALRHTWGFSAKDRNNHLHHAIDAVIIAYANNSIVKAFSDFKKEQESNSAELYAKKISELDYKNKRKFFEPFSGFRQKVLDKIDEIFVSKPERKKPSGALHEETFRKEEEFYQSYGGKEGVLKALELGKIRKVNGKIVKNGDMFRVDIFKHKKTNKFYAVPIYTMDFALKVLPNKAVARSKKGEIKDWILMDENYEFCFSLYKDSLILIQTKDMQEPEFVYYNAFTSSTVSLIVSKHDNKFETLSKNQKILFKNANEKEVIAKSIGIQNLKVFEKYIVSALGEVTKAEFRQREDFKK

SEQ ID NO: 860 - protein, 987 aa, Campylobacter coli
MARILAFDIGISSIGWAFSENDELKDCGVRIFTKAENPKTGESLALPRRLARSARKRLARRKARLNHLKHLIANEFKLNYEDYQSFDESLAKAYKGSLISPYELRFRALNELLSKQDFARVILHIAKRRGYDDIKNNGDEEKSEILKAIKQNEEKLVNYQSVGEYLYKEYFQKFKENSKEFINVRNKKESYERCIAQSFLKDELKLIFQKQREFGFSFSKKFEEEVLSVAFYKRALKDFSHLVGNCSFFTDEKRAPKNSPLAFMFVALTRIINLLNNLKNTEGILYTKDDLNTLLNEVLKNGTLTYKQTKKLLGLSDDYEFKGEKGTYFIEFKKYKEFIKALGEHNLSQDNLNEIAKDITLIKDEIKLKKALAKYDLNQNQIDSLSKLEFKDHLNISFKALKLITPLMLEGKKYDEAYNELNLKVAINEDKKDFLPAFNETYYKDEVTNPVVLRAIKEYRKVLNALLKKYGKVHKINIELAREVGKNHSQRAKIEKEQNENYKAKKDAELECEKLGLKINSKNILKLRLFKEQKEFCAYSGEKIKISDLQDEKMLEIDHIYPYSRSFDDSYMNKVLVFTKQNQEKLNQTPFEAFGNDSAKWQKIEVLAKNLPTKKQKRILDKNYKDKEQKDFKDRNLNDTRYIARLVLNYTKDYLDFLPLSDDENTKLNDTQKGSKVHVEAKSGMLTSALRHTWGFSAKDRNNHLHHAIDAVIIAYANNSIVKAFSDFKKEQESNSAELYAKKISELDYKNKRKFFEPFSGFRQKVLDKIDEIFVSKPERKKPSGALHEETFRKEEEFYQSYGGKEGVLKALELGKIRKVNGKIVKNGDMFRVDIFKHKKTNKFYAVPIYTMDFALKVLPNKAVARSKKGEIKDWILMDENYEFCFSLYKDSLILIQTKDMQEPELVYFNAFTSSTVSLIVSKHDNKFETLSKNQKILFKNANEKEVIAKSIGIQNLKVFEKYIVSALGEVTKAEFRQREDFKNELR

SEQ ID NO: 861 - protein, 984 aa, Campylobacter coli
MARILAFDIGISSIGWAFSENDELKDCGVRIFTKAENPKTGESLALPRRLARSARKRLARRKARLNHLKHLIANEFKLNYEDYQSFDESLAKAYKGSLISPYELRFRALNELLSKQDFARVILHIAKRRGYDDIKNNGDEEKSEILKAIKQNEEKLVNYQSVGEYLYKEYFQKFKENSKEFINVRNKKESYERCIAQSFLKDELKLIFQKQREFGFSFSKKFEEEVLSVAFYKRALKDFSHLVGNCSFFTDEKRAPKNSPLAFMFVALTRIINLLNNLKNTEGILYTKDDLNTLLNEVLKNGTLTYKQTKKLLGLSDDYEFKGEKGTYFIEFKKYKEFIKALGEHNLSQDNLNEIAKDITLIKDEIKLKKALAKYDLNQNQIDSLSKLEFKDHLNISFKALKLITPLMLEGKKYDEAYNELNLKVAINEDKKDFLPAFNETYYKDEVTNPVVLRAIKEYRKVLNALLKKYGKVHKINIELAREVGKNHSQRAKIEKEQNENYKAKKDAELECEKLGLKINSKNILKLRLFKEQKEFCAYSGEKIKISDLQDEKMLEIDHIYPYSRSFDDSYMNKVLVFTKQNQEKLNQTPFEAFGNDSAKWQKIEVLAKNLPTKKQKRILDKNYKDKEQKDFKDRNLNDTRYIARLVLNYTKDYLDFLPLSNDENTKLNDTQKGSKVHVEAKSGMLTSALRHTWGFSAKDRNNHLHHAIDAVIIAYANNSIVKAFSDFKKEQESNSAELYAKKISELDYKNKRKFFEPFSGFRQKVLDKIDEIFVSKPERKKPSGALHEETFRKEEEFYQSYGGKEGVLKALELGKIRKVNGKIVKNGDMFRVDIFKHKKTNKFYAVPIYTMDFALKVLPNKAVARSKKGEIKDWILMDENYEFCFSLYKDSLILIQTKDMQEPELVYFNAFTSSTVSLIVSKHDNKFETLSKNQKILFKNANEKEVIAKSIGIQNLKVFEKYIVSALGEVTKAEFRQREDFKK

SEQ ID NO: 862 - protein, 987 aa, Campylobacter coli
MARILAFDIGISSIGWAFSENDELKDCGVRIFTKAENPKTGESLALPRRLARSARKRLARRKARLNHLKHLIANEFKLNYEDYQSFDESLAKAYKGSLISPYELRFRALNELLSKQDFARVILHIAKRRGYDDIKNSDDKEKGAILKAIKQNEEKLANYQSVGEYLYKEYFQKFKENSKEFTNVRNKKESYERCIAQSFLKDELKLIFKKQREFGFSFSKKFEEEVLSVAFYKRALKDFSHLVGNCSFFTDEKRAPKNSPLAFMFVALTRIINLLNNLKNTEGILYTKDDLNALLNEVLKNGTLTYKQTKKLLGLSDDYEFKGEKGTYFIEFKKYKEFIKALGDHSLSQDDLNEIAKDITLIKDEIKLKKALAKYDLNQNQIDSLSKLEFKDHLNISFKALKLITPLMLEGKKYDEACNELNLKVAINEDKKDFLPAFNETYYKDEVTNPVVLRAIKEYRKVLNALLKKYGKVHKINIELAREVGKNYSQRAKIEKEQNENYKAKKDAELECEKLGLKINSKNILKLRLFKEQKEFCAYSGEKIKISDLQDEKMLEIDHIYPYSRSFDDSYMNKVLVFTKQNQEKLNKTPFEAFGNDSTKWQKIEVLAKNLPEKKQKRILDKNYKDKEQKDFKDRNLNDTRYIARLVLNYTKDYLDFLPLSDDENTKLNDTQKGSKVHVEAKSGMLTSALRHTWGFSTKDRNNHLHHAIDAVIIAYANNSIVKAFSDFKKEQESNSAELYAKKISELDYKNKRKFFEPFSGFRQKVLDKIDEIFVSKPERKKPSGALHEETFRKEEEFYQSYGGKEGVLKALELGKIRKVNGKIVKNGDMFRVDIFKHKKTNKFYAVPIYTMDFALKVLPNKAVARSKKGEIKDWILMDENYEFCFSLYKDSLILIQTKDMQEPEFVYYNAFTSSTVSLIVSKHDNKFETLSKNQKILFKNANEKEVIAKSIGIQNLKVFEKYIVSALGEVTKAEFRQREDFKNELR

SEQ ID NO: 863 - protein, 984 aa, Campylobacter coli
MARILAFDIGISSIGWAFSENDELKDCGVRIFTKAENPKTGESLALPRRLARSARKRLARRKARLNHLKHLIANEFKLNYEDYQSFDESLAKAYKGSLISPYELRFRALNELLSKQDFARVILHIAKRRGYDDIKNSDDKEKGAILKAIKQNEEKLTNYQSVGEYLYKEYFQKFKENSKEFTNVRNKKESYERCIAQSFLKDELKLIFKKQREFGFSFSKKFEEEVLSVAFYKRALKDFSHLVGNCSFFTDEKRAPKNSPLAFMFVALTRIINLLNNLKNTEGILYTKDDLNALLNEVLKNGTLTYKQTKKLLGLSDDYEFKGEKGTYFIEFKKYKEFIKALGDHSLSQDDLNEIAKDITLIKDEIKLKKALAKYDLNQNQIDSLSKLEFKDHLNISFKALKLITPLMLEGKKYDEACNELNLKVAINEDKKDFLPAFNETYYKDEVTNPVVLRAIKEYRKVLNALLKKYGKVHKINIELAREVGKNYSQRAKIEKEQNENYKAKKDAELECEKLGLKINSKNILKLRLFKEQKEFCAYSGEKIKISDLQDEKMLEIDHIYPYSRSFDDSYMNKVLVFTKQNQEKLNQTPFEAFGNDSAKWQKIEVLAKNLPTKKQKRILDKNYKDKEQKDFKDRNLNDTRYIARLVLNYTKDYLDFLPLSDDENTKLNDTQKGSKVHVEAKSGMLTSALRHTWGFSAKDRNNHLHHAIDAVIIAYANNSIVKAFSDFKKEQESNSAELYAKKISELDYKNKRKFFEPFSGFRQKVLDKIDEIFVSKPERKKPSGALHEETFRKEEEFYQSYGGKEGVLKALELGKIRKVNGKIVKNGDMFRVDIFKHKKTNKFYAVPIYTMDFALKVLPNKAVARSKKGEIKDWILMDENYEFCFSLYKDSLILIQTKDMQEPEFVYYNAFTSSTVSLIVSKHDNKFETLSKNQKILFKNANEKEVIAKSIGIQNLKVFEKYIVSALGEVTKAEFRQREDFKK

SEQ ID NO: 864 - protein, 965 aa, Campylobacter coli
MKIIGFNLGIANIGWALRENDEIIDCGVRVFDIPENPKNGNSLALERRENKARMKIVKRKKARMLATKTFLKKELNVDLSKLFLIGSTQSIYELRTKALSSLISKEELSAIILHIAKHRGYDDSALKNENGTIIEALNKNKEAMLKFKSVGEYFYKNFVQNKEVKKIRNTTEDYSNSVPRSLLKQELDLILDKQKELGLIKNADFKAKLFEIIFFKRPLKDFSNKIGNCIFFENEKRAAKNTISACEFVALGKVVNLLKSIEKDIGIVYEKDSINEIMSIILDKTSISYKKIRDILNLPQDINFKGLDYSKNNVENSKLVDLKKLNEFKKALGDGFTNLDKDILDSIATDITLTKDTATLKEKLKNYNVLNAEQIEKLSELVFNDHINLSLKALKQIIPLMYEGKRYDEACELCNFTIAKNQEKNEYLPLFEKTRFAKDISSPVVIRAICEFRKLLNDIIRRYGSVHKIHLELTRDFGISFNDRKKIIKEIEQNEQSRIKALETIKELKLEETSKNIQIVRLFEDQKGICPYSGLKMDLKCLDELVIDYIRPYNRSLDDSYSNKVLTFKKLNDLKQGKTPFEAFGEDEKLWAEINERIKEYNGKKRFKIFDKFFKDKKPFDFTEQTLQDTRWLTKLVASYLNEYLSFLPISEDENTALGYGEKGSKQHVILSSGMITQMLRNFWYLGFKNHKDYKNNAMDAIIVAFTTNSIIFTFNNFKKELDLAKAEFYANKISESDYLLKRKFLPPFSGFKEQALEKVKNIFVSHSLKIKNKGTLHELTPLKIKELKNTYGDLDLAVKLGKIRKYNDKYYANAKGSLVRTDLFADKENKFHAVSIYKADFSTKKLPNKTPATTSNGETKEGIEMNENYNFCMSLYKNTPISVKIKGMKEPIICYYHGFNTSGSKITYKKHDNNYHNLSEDEMVVFRKNDKESIVVGKILEIKKYSISPSGELSLIENEERKWF

SEQ ID NO: 865 - protein, 965 aa, Campylobacter coli
MKIIGFNLGIANIGWALRENDEIIDCGVRVFDIPENPKNGNSLALERRENKARMKIVKRKKARMLATKTFLKKELNVDLSKLFLIGSTQSIYELRTKALSSLISKEELSAIILHIAKHRGYDDSALKNENGTIIEALNKNKEAMLKFKSVGEYFYKNFVQNKEVKKIRNTTEDYSNSVPRSLLKQELDLILDKQKELGLIKNADFKAKLFEIIFFKRPLKDFSNKIGNCIFFENEKRAAKNTISACEFVALGKVVNLLKSIEKDIGIVYEKDSINEIMSIILDKTSISYKKIRDILNLPQDINFKGLDYSKNNAENSKLVDLKKLNEFKKALGDGFANLDKDILDSIATDITLTKDTATLKEKLKNYNVLNAEQIEKLSELVFNDHINLSLKALKQIIPLMYEGKRYDEACELCNFTIAKNQEKNEYLPLFEKTRFAKDISSPVVIRAICEFRKLLNDIIRRYGSVHKIHLELTRDFGISFNDRKKIIKEIEQNEQSRIKALETIKELKLEETSKNIQIVRLFEDQKGICPYSGLKMDLKCLDELVIDYIRPYNRSLDDSYSNKVLTFKKLNDLKQGKTPFEAFGEDEKLWAEINERIKEYNGKKRFKIFDKFFKDKKPFDFTEQTLQDTRWLTKLVASYLNEYLSFLPISEDENTALGYGEKGSKQHVVLSSGMITQMLRNFWYLGFKNHKNYKNNAMDAIIVAFTTNSIIFAFNNFKKELDLAKAEFYANKISESDYLLKRKFLPPFSGFKEQALEKVKNIFVSHSLKIKNKGTLHELTPLKIKELKNTYGDLDLAVKLGKIRKYNDKYYANTKGSLVRTDLFVDKENKFHAVSIYKADFSTKKLPNKTPATTSNGETKEGIEMNENYNFCMSLYKNTPVSVKIKGMKEPIICYYHGFNTSGSKITYKKHDNNYHNLSEDEMVVFRKNDKESIVVGKILEIKKYSISPSGELSLIENEKRKWF

SEQ ID NO: 866 - protein, 965 aa, Campylobacter coli
MKIIGFNLGIANIGWALRENDEIIDCGVRVFDIPENPKNGNSLALERRENKARMKIVKRKKARMLATKTFLKKELNVDLSKLFLIGSTQSIYELRTKALSSLISKEELSAIILHIAKHRGYDDSALKNENGTIIEALNKNKEAMLKFKSVGEYFYKNFVQNKEVKKIRNTTEDYSNSVPRSLLKQELDLILDKQKELGLIKNADFKEKLFEIIFFKRPLKDFSNKIGNCIFFENEKRAAKNTISACEFVALGKVVNLLKSIEKDIGIVYEKDSINEIMSIILDKTSISYKKIRDILNLPQDINFKGLDYSKNNAENSKLVDLKKLNEFKKALGDGFANLDKDILDSIATDITLTKDTATLKEKLKNYNVLNAEQIEKLSELVFNDHINLSLKALKQIIPLMYEGKRYDEACELCNFTIAKNQEKNEYLPLFEKTRFAKDISSPVVIRAICEFRKLLNDIIRRYGSVHKIHLELTRDFGISFNDRKKIIKEIEQNEQSRIKALETIKELKLEETSKNIQIVRLFEDQKGICPYSGLKMDLKCLDELVIDYIRPYNRSLDDSYSNKILTFKKLNDLKQGKTPFEAFGEDEKLWAEINERIKEYNGKKRFKIFDKFFKDKKPFDFTEQTLQDTRWLTKLVASYLNEYLLFLPINEDENTALGYGEKGSKQHVVLSSGMITQMLRNFWYLGFKNHKDYKNNAMDAIIVAFTTNSIIFAFNNFKKELDLAKAEFYANKISESDYLLKRKFLPPFSGFKEQALEKVKNIFVSHSLKIKNKGTLHELTPLKIKELKNTYGDLDLAVKLGKIRKYNDKYYANAKGSLVRTDLFADKENKFHAVSIYKADFSTKKLPNKTPATTSNGETKEGIEMNENYNFCMSLYKNTPISVKIKGMKEPIICYYHGFNTSGSKITYKKHDNNYHNLSEDEMVVFRKNDKESIVVGKILEIKKYSISPSGELSLIENEERKWF

SEQ ID NO: 867 - protein, 933 aa, Campylobacter coli
MKIIGFNLGIANIGWALRENDEIIDCGVRVFDIPENPKNGNSLALERRENKARMKIVKRKKARMLATKTFLKKELNVDLSKLFLIGSTQSIYELRTKALSSLISKEELSVIILHIAKHRGYDDSALKNENGTIIEALNKNKETMLKFKSVGEYFYKNFVQNKEVKKIRNTTEDYSNSVPRSLLKQELDLILDRQKELGLIKNADFKAKLFEIIFFKRPLKDFSNKIGNCIFFENEKRAAKNTISACEFVALGKVVNLLKSIEKDIGIVYEKDSINEIMSIILDKTSISYKKIRDILNLPQDINFKGLDYSKNNVENSKLVDLKKLNEFKKALGDGFTNLDKDILDSIATDITLTKDTATLKEKLKNYNVLNAEQIEKLSELVFNDHINLSLKALKQIIPLMYEGKRYDEACELCNFTIAKNQEKNEYLPLFEKTRFAKDISSPVVIRAICEFRKLLNDIIRRYGSVHKIHLELTRDFGISFNDRKKIIKEIEQNEQSRIKALETIKELKLEETSKNIQIVRLFEDQKGICPYSGLKMDLKCLDELVIDYIRPYNRSLDDSYSNKVLTFKKLNDLKQGKTPFEAFGEDEKLWAEINERIKEYNGKKRFKIFDKFFKDKKPFDFTEQTLQDTRWLTKLVASYLNEHLSFLPISEDENTALGYGEKGSKQHVILSSGMITQMLRNFWYLGFKNHKDYKNNAMDAIIVAFTTNSIIFTFNNFKKELDLAKAEFYANKISESDYLLKRKFLPPFSGFKEQALEKVKNIFVSHSLKIKNKGTLHELTPLKIKELKNTYGDLDLAVKLGKIRKYNDKYYANANGSLVRSDLFIDKKNKFHAVPIYKADFSTKKLPNKTPATTSNGETKEGIEMNENYNFCMSLYKNTPISVKIKGMKESIICYYHGFNTSGSKITYKKHDNNYHNLSEDEMVVFRKNDKE

SEQ ID NO: 868 - protein, 666 aa, Campylobacter jejuni
KGEKGTYFIEFKKYKEFIKALDEHSLSQDDLNEIAKDITLIKDEIKLKKALAKYDLKENQIDSLSKLEFKDHLNISFKALKLITPLMLEGKKYDEACNELNLKVAINEDKKDFLPAFNETYYKDEVTNPVVLRAIKEYRKILNALLKKYGKVHKINIELAREVGKNHSQRAKIEKEQNENYKAKKDAELECEKLGLKINSKNILKLRLFKEQKEFCVYSGEKIKLSDLQDEKMLEIDHIYPYSRSFDDSYMNKVLVFAKQNQEKLNKTPFEAFGNDSTKWQKIEVLTKNLPTKKQKRILDKNYKDKEQKDFKDRNLNDTRYIARLVLNYTKDYLDFLPLSDDENTKLNDTQKGSKVHVEAKSGMLTSALRHTWGFSTKDRNNHLHHAIDAAIIAYANNSIVKAFSDFKKEQESNSAELYAKKISELDYKNKRKFFEPFSGFRQKVLDKIDEIFVSKPERKKPSGALHEETFRKEEEFYQSYGGKEGVLKALELGKIRKVNGKIVKNGDMFRVDIFKHKKTNKFYAVPIYTMDFALKVLPNKAVARSKKGEIKDWILMDEDYEFCFSLYKDSLILIQTKDMQEPELVYFNAFTSSTVSLIVSKHDNKFETLSKNQKILFKNANEKEVIAKSIGIQNLKVFEKYIVSALGEVTKAEFRQREDFKNELR

SEQ ID NO: 869 - protein, 190 aa, Campylobacter jejuni
MAFDIGISSIGWAFSENDELKDCGVRIFTKVENPKTGESLALPRRLARSARKRLARRKARLNHLKHLIANEFKLNYEDYQSFDESLAKAYKGSLISPYELRFRALNELLSKQDFARVILHIAKRRGYDDIKNSDDKEKGAILKAIKQNEEKLANYQSVGEYLYKEYFQKFKENSKEFTNVRNKKKVMNAA

SEQ ID NO: 870 - protein, 985 aa, Campylobacter jejuni
MAKILAFDIGISSIGWAFVENDELKDCGVRIFTKAENPKTGESLALPRRLARSARKRLARRKARLNHLKHLIANEFKLNYEDYQSFDESLAKAYKGTLISPYELRFKALNELLSKQDLARVILHIAKRRGYDNIKNSDDKEKGAILKAVKENEEKLANYKSVGEYLYKEYFQKFKENSKEFINVRNKKESYERCIAQSFLKDELKLIFQKQREFGFNFSKKFEEEVLSVAFYKRALKDFSHLVGNCSFFVDEKRAPKNSPLAFEFVALTRIVNLLNNLNKNNSYIKDDLNALLSEVLKNGTLTYKQTKKILGLSDDYEFKGQKGNYFIEFKKYKEFIKALCEHNLNQDDLNEIAKDITLVKDETKLKKALAKYDLNQNQIENLSKIEFKDHLNISFKALKLIVPLMREGKKYDEVCNELNLKTAINEDKKEFLPAFNETYYKDEVNNPVVLRAIKEYRKVLNSLLKKYGKVHKINIELAREVGKNHRERSKIEKEQNENFKAKKDAELECEKLGLKINSKNILKLRLFKEQKEFCVYSGEKIKISDLQDEKMLEIDHIYPYSRSFDDSYMNKVLVFTKQNQEKLNKTPFEAFGKDDVKWQKIETLAKNLPAKKQKRILDKNYKDKEQKDFKDRNLNDTRYIARLVLNYTKDYLEFLPLSDDENIKLNDTQKGSKVHVEAKSGMLTSVLRHTWGFSTKDRNNHLHHAIDAVIIAYANASVVKAFSDFKKEQENYTAELYAKKINELDFKNKRKFFEPFSNFRQKVLEKIDEIFVSKPERKKPSGALHEETFYKEEEFYKEYGGKEGVLKALELGKIRKVNGKIVSNANMFRVDIFKYKKTNKFYAVPIYTMDFALGILPNKAVVGGKDKQGIIKDWLLMDENYEFCFSLYKDSLILLQTKDMQEPELVYFKSFKSSTAGLVVSKHDNKFENLNENQKKLFKSANEKKVVAEGIGIQNLKVFEKYIVSALGEITKAEIKERENFKKK

SEQ ID NO: 871 - protein, 987 aa, Campylobacter jejuni
MARILAFDIGISSIGWAFSENDELKDCGVRIFTKAENPKTGESLALPRCLARSARKRLARRKARLNHLKHLIANEFKLNYEDYQSFDESLAKAYKGSLISPYELRFRALNELLSKQDFARVILHIAKRRGYDDIKNNGDEEKGEILKAIKQNEEKLVSYQSVGEYLYKEYFQKFKENSKEFINVRNKKESYERCIAQSFLKDELKLIFQKQRKFGFSFSKKFEEEVLSVAFYKRALKDFSHLVGNCSFFTDEKRAPKNSPLAFMFVALTRIINLLNNLKNTEGILYTKDDLNTLLNEVLKNGTLTYKQTKKLLGLSNDYEFKGEKGTYFIEFQKYKEFVKALGEHNLSQDDLNEIAKDITLIKDEIKLKKALAKYDLNQNQIDSLSKLEFKDHLNISFKALKLITPLMLEGKKYDEACNELNLKVAINEDKKDFLPAFNETYYKDEVTNPVVLRAIKEYRKVLNALLKKYGKVHKINIELAREVGKNHSQRAKIEKEQNENYKAKKDAELECEKLGLKINSKNILKLRLFKEQKEFCVYSGEKIKISDLQDEKMLEIDHIYPYSRSFDDSYMNKVLVFTKQNQEKLNKTPFETFGNDRVKWQKIEVLAKNLPTKKQKRILDKNYKDKEQKDFKDRNLNDTRYIARLVLNYTKDYLDFLPLSDDENTKLNDTQKGSKVHVEAKSGMLTSTLRHTWGFSTKDRNNHLHHAIDAAIIAYANNSIVKAFSDFKKEQESNTAELYAKKISELDYKNKRKFFEPFSGFRQKLLDKIDEIFVSKPERKKPSGALHEETFRKEEEFYQSYGGKEGVLKALELGKIRKVNGKIVSNGDMFRVDIFKHKKTNKFYAVPIYTMDFALKVLPNKAVVQGKDKKSGLIKDWILMDENYEFCFSLYKDSLILIQTKDMQEPELVYYERLDSSNASLTVSKHDNKFETLSKNQKILFKNANEKEVIAKSIGIQNLKVFEKYIVSALGEVTKAEFRQREDFKK

SEQ ID NO: 872 - protein, 987 aa, Campylobacter jejuni
MARILAFDIGISSIGWAFSENDELKDCGVRIFTKAENPKTGESLALPRRLARSARKRLARRKARLNHLKHLIANEFKLNYEDYQSFDEGLAKAYKGSLISPYELRFRALNELLSKQDFARVILHIAKRRGYDDIKNNGDEEKSEILKAIKQNEEKLVNYQSVGEYLYKEYFQKFKENSKEFINVRNKKESYERCIAQSFLKDELKLIFQKQREFGFSFSKKFEEEVLSVAFYKRALKDFSHLVGNCSFFTDEKRAPKNSPLAFMFVALTRIINLLNNLKNTEGILYTKDDLNTLLNEVLKNGTLTYKQTKKLLGLSDDYEFKGEKGTYFIEFKKYKEFIKALGEHNLSQDNLNEIAKDITLIKDEIKLKKALAKYDLNQNQIDSLSKLEFKDHLNISFKALKLITPLMLEGKKYDEAYNELNLKVAINEDKKDFLPAFNETYYKDEVTNPVVLRAIKEYRKVLNALLKKYGKVHKINIELAREVGKNHSQRAKIEKEQNENYKAKKDAELECEKLGLKINSKNILKLRLFKEQKEFCAYSGEKIKISDLQDEKMLEIDHIYPYSRSFDDSYMNKVLVFTKQNQEKLNQTPFEAFGNDSAKWQKIEVLAKNLPTKKQKRILDKNYKDKEQKDFKDRNLNDTRYIARLVLNYTKDYLDFLPLSDDENTKLNDTQKGSKVHVEAKSGMLTSALRHTWGFSAKDRNNHLHHAIDAVIIAYANNSIVKAFSDFKKEQESNSAELYAKKISELDYKNKRKFFEPFSGFRQKVLDKIDEIFVSKPERKKPSGALHEETFRKEEEFYQSYGGKEGVLKALELGKIRKVNGKIVKNGDMFRVDIFKHKKTNKFYAVPIYTMDFALKVLPNKAVVQGKDKKSGLIKDWILMDENYEFCFSLYKDSLILIQTKDMQEPELVYFNAFTSSTVSLIVSKHDNKFETLSKNQKILFKNANEKEVIAKSIGIQNLKVFEKYIVSALGEVTKAEFRQREDFKK

SEQ ID NO: 873 - protein, 961 aa, Campylobacter jejuni
MARILAFDIGISSIGWAFSENDELKDCGVRIFTKAENPKTGESLALPRRLARSARKRLARRKARLNHLKHLIANEFKLNYEDYQSFDESLAKAYKGSLISPYELRFRALNELLSKQDFARVILHIAKRRGYDDIKNNGDEEKGKILKAIKQNEEKLVNYQSVGEYLYKEYFQKFKENSKEFINVRNKKESYERCITQSFLKYELKLIFQKQREFGFSFSKKFEEEVLSVAFYKRALKDFSHLVGNCSFFSDEKRAPKNSPLAFMFVALTRIINLLNNLKNTEGILYTKDDLNALLNEVLKNGTLTYKQTKKLLGLSDDYEFKGEKGTYFIEFKKYKEFIKALGEHNLSQDDLNEIAKDITLIKDEIKLKKALAKYDLNQNQIDSLSKLEFKDHLNIGFKALKLITPLMLEGKKYDEACNELNLKVAINEDKKDFLPAFNETYYKDEVTNPVVLRAIKEYRKVLNALLKKYGKVHKINIELAREVGKNHSQRAKIEKEQNENYKAKKDAELECEKLGLKINSKNILKLRLFKEQKEFCAYSGEKIKLSDLQDEKMLEIDHIYPYSRSFDDSYMNKVLVFTKQNQEKLNKTPFEAFGNDNVKWQKIEVLAKNLPEKKQKRILDKNYKDKEQKDFKDRNLNDTRYIARLVLNYTKDYLDFLPLSDDENTKLKGSKVHVEAKSGMLTSALRHTWGFSTKDRNNHLHHAIDAAIIAYANNSIVKDFSDFKKEQESNSAELYAKKISELDYKNKRKFFEPFSGFRQKVLDKIDEIFVSKPERKKPSGALHEETFRKEEEFYQSYGGKEGVLKALELGKIRKVNGKIVKNGDMFRVDIFKHKKTNKFYAVPIYTMDFALKVLPNKAVARSKKGEIKDWILMDENYEFCFSLYKDSLILIQTKDMQEPELVYFNAFTSSTVSLIVSKHDNKFETLSKNLKVFEKYIVSALGEVTKAEFRQREDFKNELR

SEQ ID NO: 874 - protein, 984 aa, Campylobacter jejuni
MARILAFDIGISSIGWAFSENDELKDCGVRIFTKAENPKTGESLALPRRLARSARKRLARRKARLNHLKHLIANEFKLNYEDYQSFDESLAKAYKGSLISPYELRFRALNELLSKQDFARVILHIAKRRGYDDIKNNGDEEKGKILKAIKQNEEKLVNYQSVGEYLYKEYFQKFKENSKEFINVRNKKESYERCITQSFLKYELKLIFQKQREFGFSFSKKFEEEVLSVAFYKRALKDFSHLVGNCSFFTDEKRAPKNSPLAFMFVALTRIINILNNLKNTEGILYTKDDLNALLNEVLKNGTLTYKQTKKLLGLSDDYEFKGEKGTYFIEFKKYKEFIKALGEHNLSQDDLNEIAKDITLIKDEIKLKKALAKYDLNQNQIDSLSKLEFKDHLNISFKALKLITPLMLEGKKYDEACNELNLKVAINEDKKDFLPAFNETYYKDEVTNPVVLRAIKEYRKILNALLKKYGKVHKINIELAREVGKNHSQRAKIEKEQNENYKAKKDAEIECEKLGLKINSKNILKLRLFKEQKEFCAYSGEKIKISDLQDEKMLEIDHIYPYSRSFDDSYMNKVLVFTKQNQEKLNQTPFEAFGNDSAKWQKIEVLAKNLPTKKQKRILDKNYKDKEQKDFKDRNLNDTRYIARLVLNYTKDYLDFLPLSDDENTKLNDTQKGSKVHVEAKSGMLTSALRHTWGFSAKDRNNHLHHAIDAVIIAYANNSIVKAFSDFKKEQESNSAELYAKKISELDYKNKRKFFEPFSGFRQKVLDKIDEIFVSKPERKKPSGALHEETFRKEEEFYQSYGGKEGVLKALELGKIRKVNGKIVKNGDMFRVDIFKHKKTNKFYAVPIYTMDFALKVLPNKAVARSKKGEIKDWILMDENYEFCFSLYKDSLILIQTKDMQEPEFVYYNAFTSSTVSLIVSKHDNKFETLSKNQKILFKNANEKEVIAKSIGIQNLKVFEKYIVSALGEVTKAEFRQREDFKK

SEQ ID NO: 875 - protein, 987 aa, Campylobacter jejuni
MARILAFDIGISSIGWAFSENDELKDCGVRIFTKAENPKTGESLALPRRLARSARKRLARRKARLNHLKHLIANEFKLNYEDYQSFDESLAKAYKGSLISPYELRFRALNELLSKQDFARVILHIAKRRGYDDIKNNGDEEKGKILKAIKQNEEKLVSYQSVGEYLYKEYFQKFKENSKEFINVRNKKESYERCIAQSFLKDELKLIFQKQREFGFSFSKKFEEEVLSVAFYKRALKDFSHLVGNCSFLLMKKERQKNSPLAFMFVALTRIINLLNNLKNTEGILYTKDDLNTLLNEALKNGTLTYKQTKKLLGLSNDYEFKGEKGTYFIEFQKYKEFVKALGEHNLSQDDLNEIAKDITLIKDEIKLKKALAKYDLNQNQIDSLSKLEFKDHLNISFKALKLITPLMLEGKKYDEACNELNLKVAINEDKKDFLPAFNETYYKDEVTNPVVLRAIKEYRKVLNALLKKYGKVHKINIELAREVGKNHSQRAKIEKEQNENYKAKKDAELECEKLGLKINSKNILKLRLFKEQKEFCVYSGEKIKISDLQDEKMLEIDHIYPYSRSFDDSYMNKVLVFTKQNQEKLNKTPFETFGNDRVKWQKIEVLAKNLPTKKQKRILDKNYKDKEQKDFKDRNLNDTRYIARLVLNYTKDYLDFLPLSDDENTKLNDTQKGSKVHVEAKSGMLTSTLRHTWGFSTKDRNNHLHHAIDAAIIAYANNSIVKAFSDFKKEQESNTAELYAKKISELDYKNKRKFFEPFSGFRQKLLDKIDEIFVSKPERKKPSGALHEETFRKEEEFYQSYGGKEGVLKALELGKIRKVNGKMVKNGDMFRVDIFKHKKTNKFYAVPIYTMDFALKVLPNKAVVQGKDKKSGLIKDWILMDENYEFCFSLYKDSLILIQTKDMQEPELVYYERLDSSNASLTVSKHDNKFETLSKNQKILFKNANEKEVIAKSIGIQNLKVFEKYIVSALGEVTKAEFRQREDFKK

SEQ ID NO: 876 - protein, 987 aa, Campylobacter jejuni
MARILAFDIGISSIGWAFSENDELKDCGVRIFTKAENPKTGESLALPRRLARSARKRLARRKARLNHLKHLIANEFKLNYEDYQSFDESLAKAYKGSLISPYELRFRALNELLSKQDFARVILHIAKRRGYDDIKNNGDEEKSEILKAIKQNEEKLVNYQSVGEYLYKEYFQKFKENSKEFINVRNKKESYERCIAQSFLKDELKLIFQKQREFGFSFSKKFEEEVLSVAFYKRALKDFSHLVGNCSFFTDEKRAPKNSPLAFMFVALTRIINLLNNLKNTEGILYTKDDLNTLLNEVLKNGTLTYKQTKKLLGLSDDYEFKGEKGTYFIEFKKYKEFIKALGEHNLSQDNLNEIAKDITLIKDEIKLKKALAKYDLNQNQIDSLSKLEFKDHLNISFKALKLITPLMLEGKKYDEAYNELNLKVAINEDKKDFLPAFNETYYKDEVTNPVVLRAIKEYRKVLNALLKKYGKVHKINIELAREVGKNHSQRAKIEKEQNENYKAKKDAELECEKLGLKINSKNILKLRLFKEQKEFCAYSGEKIKISDLQDEKMLEIDHIYPYSRSFDDSYMNKVLVFTKQNQEKLNQTPFEAFGNDSAKWQKIEVLAKNLPTKKQKRILDKNYKDKEQKDFKDRNLNDTRYIARLVLNYTKDYLDFLPLSDDENTKLNDTQKGSKVHVEAKSGMLTSALRHTWGFSAKDRNNHLHHAIDAVIIAYANNSIVKAFSDFKKEQESNSAELYAKKISELDYKNKRKFFEPFSGFRQKVLDKIDEIFVSKPERKKPSGALHEETFRKEEEFYQSYGGKEGVLKALELGKIRKVNGKIVKNGDMFRVDIFKHKKTNKFYPVPIYTMDFALKVLPNKAVVQGKDKKSGLIKDWILMDENYEFCFSLYKDSLILIQTKDMQEPELVYFNAFTSSTVSLIVSKHDNKFETLSKNQKILFKNANEKEVIAKSIGIQNLKVFEKYIVSALGEVTKAEFRQREDFKK

SEQ ID NO: 877 - protein, 987 aa, Campylobacter jejuni
MARILAFDIGISSIGWAFSENDELKDCGVRIFTKAENPKTGESLALPRRLARSARKRLARRKARLNHLKHLIANEFKLNYEDYQSFDESLAKAYKGSLISPYELRFRALNELLSKQDFARVILHIAKRRGYDDIKNNGDEEKSEILKAIKQNEEKLVNYQSVGEYLYKEYFQKFKENSKEFINVRNKKESYERCIAQSFLKDELKLIFQKQREFGFSFSKKFEEEVLSVAFYKRALKDFSHLVGNCSFFTDEKRAPKNSPLAFMFVALTRIINLLNNLKNTEGILYTKDDLNTLLNEVLKNGTLTYKQTKKLLGLSDDYEFKGEKGTYFIEFKKYKEFIKALGEHNLSQDNLNEIAKDITLIKDEIKLKKALAKYDLNQNQIDSLSKLEFKDHLNISFKALKLITPLMLEGKKYDEAYNELNLKVAINEDKKDFLPAFNETYYKDEVTNPVVLRAIKEYRKVLNALLKKYGKVHKINIELAREVGKNHSQRAKIEKEQNENYKAKKDAELECEKLGLKINSKNILKLRLFKEQKEFCAYSGEKIKISDLQDEKMLEIDHIYPYSRSFDDSYMNKVLVFTKQNQEKLNQTPFEAFGNDSAKWQKIEVLAKNLPTKKQKRILDKNYKDKEQKDFKDRNLNDTRYIARLVLNYTKDYLDFLPLSDDENTKLNDTQKGSKVHVEAKSGMLTSALRHTWGFSAKDRNNHLHHAIDAVIIAYANNSIVKAFSDFKKEQESNSAELYAKKISELDYKNKRKFFEPFSGFRQKVLDKIDEIFVSKPERKKPSGALHEETFRKEEEFHQSYGGKEGVLKALELGKIRKVNGKIVKNGDMFRVDIFKHKKTNKFYAVPIYTMDFALKVLPNKAVVQGKDKKSGLIKDWILMDENYEFCFSLYKDSLILIQTKDMQEPELVYFNAFTSSTVSLIVSKHDNKFETLSKNQKILFKNANEKEVIAKSIGIQNLKVFEKYIVSALGEVTKAEFRQREDFKK

SEQ ID NO: 878 - protein, 987 aa, Campylobacter jejuni
MARILAFDIGISSIGWAFSENDELKDCGVRIFTKAENPKTGESLALPRRLARSARKRLARRKARLNHLKHLIANEFKLNYEDYQSFDESLAKAYKGSLISPYELRFRALNELLSKQDFARVILHIAKRRGYDDIKNNGDEEKSEILKAIKQNEEKLVNYQSVGEYLYKEYFQKFKENSKEFINVRNKKESYERCIAQSFLKDELKLIFQKQREFGFSFSKKFEEEVLSVAFYKRALKDFSHLVGNCSFFTDEKRAPKNSPLAFMFVALTRIINLLNNLKNTEGILYTKDDLNTLLNEVLKNGTLTYKQTKKLLGLSDDYEFKGEKGTYFIEFKKYKEFIKALGEHNLSQDNLNEIAKDITLIKDEIKLKKALAKYDLNQNQIDSLSKLEFKDHLNISFKALKLITPLMLEGKKYDEAYNELNLKVAINEDKKDFLPAFNETYYKDEVTNPVVLRAIKEYRKVLNALLKKYGKVHKINIELAREVGKNHSQRAKIEKEQNENYKAKKDAELECEKLGLKINSKNILKLRLFKEQKEFCAYSGEKIKISDLQDEKMLEIDHIYPYSRSFDDSYMNKVLVFTKQNQEKLNQTPFEAFGNDSAKWQKIEVLAKNLPTKKQKRILDKNYKDKEQKDFKDRNLNDTRYIARLVLNYTKDYLDFLPLSDDENTKLNDTQKGSKVHVEAKSGMLTSALRHTWGFSAKDRNNHLHHAIDAVIIAYANNSIVKAFSDFKKEQESNSAELYAKKISELDYKNKRKFFEPFSGFRQKVLDKIDEIFVSKPERKKPSGALHEETFRKEEEFYQSYGGKEGVLKALELGKIRKVNGKIVKNGDMFRVDIFKHKKTNKFYAVPIYTMDFALKVLPNKAVVQGKDKKSGLIKDWILMDENYEFCFSLYKDSLILIQTKDMQEPELVYFNAFTSSTVSLIVSKHDNKFETLSKNQKILFKNANEKEVIAKSIGIQNLKVFEKYIVSALGEVTKAEFRQREDFKK

SEQ ID NO: 879 - protein, 861 aa, Campylobacter jejuni
MARILAFDIGISSIGWAFSENDELKDCGVRIFTKAENPKTGESLALPRRLARSARKRLARRKARLNHLKHLIANEFKLNYEDYQSFDESLAKAYKGSLISPYELRFRALNELLSKQDFARVILHIAKRRGYDDIKNNGDEEKSEILKAIKQNEEKLVNYQSVGEYLYKEYFQKFKENSKEFINVRNKKESYERCITQSFLKDELKLIFQKQREFGFSFSKKFEEEVLSVAFYKRALKDFSHLVGNCSFFTDEKRAPKNSPLAFMFVALTRIINILNNLKNTEGILYTKDDLNALLNEVLKNGTLTYKQTKKLLGLSDDYEFKGEKGTYFIEFKKYKEFIKALGEHNLSQDDLNEIAKDITLIKDEIKLKKALAKYDLNQNQIDSLSKLEFKDHLNISFKALKLITPLMLEGKKYDEACNELNLKVAINEDKKDFLPAFNETYYKDEVTNPVVLRAIKEYRKILNALLKKYGKVHKINIELAREVGKNHSQRAKIEKEQNENYKAKKDAEIECEKLGLKINSKNILKLRLFKEQKEFCAYSGEKIKLSDLQDEKMLEIDHIYPYSRSFDDSYMNKVLVFTKQNQEKLNKTPFEAFGNDSTKWQKIEVLAKNLPEKKQKRILDKNYKDKEQKDFKDRNLNDTRYIARLVLNYTKDYLDFLPLSDDENTKLNDTQKGSKVHVEAKSGMLTSALRHTWGFSAKDRNNHLHHAIDAAIIAYANNSIVKAFSDFKKEQESNSVELYAKKISELDYKNKRKFFEPFSGFRQKVLDKIDEIFVSKPERKKPSGALHEETFRKEEEFYQSYGGKEGVLKALELGKIRKVNGKIVKNGDMFRVDIFKHKKTNKFLCCANLYYGFCFKSITK

SEQ ID NO: 880 - protein, 462 aa, Campylobacter jejuni
MARILAFDIGISSIGWAFSENDELKDCGVRIFTKAENPKTGESLALPRRLARSARKRLARRKARLNHLKHLIANEFKLNYEDYQSFDESLAKAYKGSLISPYELRFRALNELLSKQDFARVILHIAKRRGYDDIKNNGDEEKSEILKAIKQNEEKLVNYQSVGEYLYKEYFQKFKENSKEFINVRNKKESYERCITQSFLKDELKLIFQKQREFGFSFSKKFEEEVLSVAFYKRALKDFSHLVGNCSFFTDEKRAPKNSPLAFMFVALTRIINILNNLKNTEGILYTKDDLNALLNEVLKNGTLTYKQTKKLLGLSDDYEFKGEKGTYFIEFKKYKEFIKALGEHNLSQDDLNEIAKDITLIKDEIKLKKALAKYDLNQNQIDSLSKLEFKDHLNISFKALKLITPLMLEGKKYDEACNELNLKVAINEDKKDFLPAFNETYYKDEVTNPVVLRAIKEYRKS

SEQ ID NO: 881 - protein, 984 aa, Campylobacter jejuni
MARILAFDIGISSIGWAFSENDELKDCGVRIFTKAENPKTGESLALPRRLARSARKRLARRKARLNHLKHLIANEFKLNYEDYQSFDESLAKAYKGSLISPYELRFRALNELLSKQDFARVILHIAKRRGYDDIKNNGDEEKSEILKAIKQNEEKLVNYQSVGEYLYKEYFQKFKENSKEFINVRNKKESYERCITQSFLKDELKLIFQKQREFGFSFSKKFEEEVLSVAFYKRALKDFSHLVGNCSFFTDEKRAPKNSPLAFMFVALTRIINLLNNLKNTEGILYTKDDLNALLNEVLKNGTLTYKQTKKLLGLSDDYEFKGEKGTYFIEFKKYKEFIKALDEHSLSQDDLNEIAKDITLIKDEIKLKKALAKYDLNQNQIDSLSKLEFKDHLNISFKALKLITPLMLEGKKYDEACNELNLKVAINEDKKDFLPAFNETYYKDEVTNPVVLRAIKEYRKILNALLKKYGKVHKINIELAREVGKNHSQRAKIEKEQNENYKAKKDAEIECEKLGLKINSKNILKLRLFKEQKEFCAYSGEKIKISDLQDEKMLEIDHIYPYSRSFDDSYMNKVLVFTKQNQEKLNKTPFEAFGNDGVKWQKIEVLAKNLPEKKQKRILDKNYKDKEQKDFKDRNLNDTRYIARLVLNYTKDYLDFLPLSDDENTKLNDTQKGSKVHVEAKSGMLTSALRHTWGFSTKDRNNHLHHAIDAAIIAYANNSIVKAFSDFKKEQESNSAELYAKKISELDYKNKRKFFEPFSGFRQKVLDKIDEIFVSKPERKKPSGALHEETFRKEEEFYQSYGGKEGVLKALELGKIRKVNGKIVKNGDMFRVDIFKHKKTNKFYAVPIYTMDFALKVLPNKAVARSKKGEIKDWILMDENYEFCFSLYKDSLILIQTKDMQEPELVYFNAFTSSTVSLVVSKHDNKFETLSKNQKILFKNANEKEVIAKSIGIQNLKVFEKYIVSALGEVTKAEFRQREDFKK

SEQ ID NO: 882 - protein, 984 aa, Campylobacter jejuni
MARILAFDIGISSIGWAFSENDELKDCGVRIFTKAENPKTGESLALPRRLARSARKRLARRKARLNHLKHLIANEFKLNYEDYQSFDESLAKAYKGSLISPYELRFRALNELLSKQDFARVILHIAKRRGYDDIKNSDDKEKGAILKAIKQNEEKLANYQSVGEYLYKEYFQKFKENSKEFTNVRNKKESYERCIAQSFLKDELKLIFKKQREFGFSFSKKFEEEVLSVAFYKRALKDFSHLVGNCSFFTDEKRAPKNSPLAFMFVALTRIINLLNNLKNTEGILYTKDDLNALLNEVLKNGTLTYKQTKKLLGLSDDYEFKGEKGTYFIEFKKYKEFIKALGDHSLSQDDLNEIAKDITLIKDEIKLKKALAKYDLNQNQIDSLSKLEFKDHLNISFKALKLITPLMLEGKKYDEACNELNLKVAINEDKKDFLPAFNETYYKDEVTNPVVLRAIKEYRKVLNALLKKYGKVHKINIELAREVGKNYSQRAKIEKEQNENYKAKKDAELECEKLGLKINSKNILKLRLFKEQKEFCAYSGEKIKISDLQDEKMLEIDHIYPYSRSFDDSYMNKVLVFTKQNQEKLNQTPFEAFGNDSAKWQKIEVLAKNLPTKKQKRILDKNYKDKEQKDFKDRNLNDTRYIARLVLNYTKDYLDFLPLSDDENTKLNDTQKGSKVHVEAKSGMLTSALRHTWGFSAKDRNNHLHHAIDAVIIAYANNSIVKAFSDFKKEQESNSAELYAKKISELDYKNKRKFFEPFSGFRQKVLDKIDEIFVSKPERKKPSGALHEETFRKEEEFYQSYGGKEGVLKALELGKIRKVNGKIVKNGDMFRVDIFKHKKTNKFYAVPIYTMDFALKVLPNKAVARSKKGEIKDWILMDENYEFCFSLYKDSLILIQTKDMQEPEFVYYNAFTSSTVSLIVSKHDNKFETLSKNQKILFKNANEKEVIAKSIGIQNLKVFEKYIVSALGEVTKAEFRQREDFKK

SEQ ID NO: 883 - protein, 984 aa, Campylobacter jejuni
MARILAFDIGISSIGWAFSENDELKDCGVRIFTKAENPKTGESLALPRRLARSARKRLARRKARLNHLKHLIANEFKLNYEDYQSFDESLAKAYKGSLISPYELRFRALNELLSKQDFARVILHIAKRRGYDDIKNSDDKEKGAILKAIKQNEEKLANYQSVGEYLYKEYFQKFKENSKEFTNVRNKKESYERCIAQSFLKDELKLIFKKQREFGFSFSKKFEEEVLSVAFYKRALKDFSHLVGNCSFFTDEKRAPKNSPLAFMFVALTRIINLLNNLKNTEGILYTKDDLNTLLNEVLKNGTLTYKQTKKLLGLSDDYEFKGEKGTYFIEFKKYKEFIKALGEHNLSQDDLNEIAKDITLIKDEIKLKKALAKYDLNQNQIDSLSKLEFKDHLNISFKALKLITPLMLEGKKYDEACNELNLKVAINEDKKDFLPAFNETYYKDEVTNPVVLRAIKEYRKVLNALLKKYGKVHKINIELAREVGKNYSQRAKIEKEQNENYKAKKDAELECEKLGLKINSKNILKLRLFKEQKEFCAYSGEKIKISDLQDEKMLEIDHIYPYSRSFDDSYMNKVLVFTKQNQEKLNKTPFEAFGNDSTKWQKIEVLAKNLPEKKQKRILDKNYKDKEQKDFKDRNLNDTRYIARLVLNYTKDYLDFLPLSDDENTKLNDTQKGLKVHVEAKSGMLTSALRHTWGFSAKDRNNHLHHAIDAVIIAYANNSIVKAFSDFKKEQESNSAELYAKKISELDYKNKRKFFEPFSGFRQKVLDKIDEIFVSKPERKKPSGALHEETFRKEEEFYQSYGGKEGVLKALELGKIRKVNGKIVKNGDMFRVDIFKHKKTNKFYAVPIYTMDFALKVLPNKAVARSKKGEIKDWILMDENYEFCFSLYKDSLILIQTKDMQEPEFVYYNAFTSSTVSLIVSKHDNKFETLSKNQKILFKNANEKEVIAKSIGIQNLKVFEKYIVSALGEVTKAEFRQREDFKK

SEQ ID NO: 884 - protein, 984 aa, Campylobacter jejuni
MARILAFDIGISSIGWAFSENDELKDCGVRIFTKAENPKTGESLALPRRLARSARKRLARRKARLNHLKHLIANEFKLNYEDYQSFDESLAKAYKGSLISPYELRFRALNELLSKQDFARVILHIAKRRGYDDIKNSDDKEKGAILKAIKQNEEKLANYQSVGEYLYKEYFQKFKENSKEFTNVRNKKESYERCIAQSFLKDELKLIFKKQREFGFSFSKKFEEEVLSVAFYKRALKDFSHLVGNCSFFTDEKRAPKNSPLAFMFVALTRIINLLNNLKNTEGILYTKDDLNALLNEVLKNGTLTYKQTKKLLGLSDDYEFKGEKGTYFIEFKKYKEFIKALGDHSLSQDDLNEIAKDITLIKDEIKLKKALAKYDLNQNQIDSLSKLEFKDHLNISFKALKLITPLMLEGKKYDEACNELNLKVAINEDKKDFLPAFNETYYKDEVTNPVVLRAIKEYRKVLNALLKKYGKVHKINIELAREVGKNYSQRAKIEKEQNENYKAKKDAELECEKLGLKINSKNILKLRLFKEQKEFCAYSGEKIKISDLQDEKMLEIDHIYPYSRSFDDSYMNKVLVFTKQNQEKLNQTPFEAFGNDSAKWQKIEVLAKNLPTKKQKRILDKNYKDKEQKNFKDRNLNDTRYIARLVLNYTKDYLDFLPLSDDENTKLNDTQKGSKVHVEAKSGMLTSALRHTWGFSAKDRNNHLHHTIDAVIIAYANNSIVKAFSDFKKEQESNSAELYAKKISELDYKNKRKFFEPFSGFRQKVLDKIDEIFVSKPERKKPSGALHEETFRKEEEFYQSYGGKEGVLKALELGKIRKVNGKIVKNGDMFRVDIFKHKKTNKFYAVPIYTMDFALKVLPNKAVARSKKGEIKDWILMDENYEFCFSLYKDSLILIQTKDMQEPEFVYYNAFTSSTVSLIVSKHDNKFETLSKNQKILFKNANEKEVIAKSIGIQNLKVFEKYIVSALGEVTKAEFRQREDFKK

SEQ ID NO: 885 - protein, 984 aa, Campylobacter jejuni
MARILAFDIGISSIGWAFSENDELKDCGVRIFTKAENPKTGESLALPRRLARSARKRLARRKARLNHLKHLIANEFKLNYEDYQSFDESLAKAYKGSLISPYELRFRALNELLSKQDFARVILHIAKRRGYDDIKNSDDKEKGAILKAIKQNEEKLANYQSVGEYLYKEYFQKFKENSKEFTNVRNKKESYERCIAQSFLKDELKLIFKKQREFGFSFSKKFEEEVLSVAFYKRALKDFSHLVGNCSFFTDEKRAPKNSPLAFMFVALTRIINLLNNLKNTEGILYTKDDLNTFLNEVLKNGTLTYKQTKKLLGLSDDYEFKGEKGTYFIEFKKYKEFIKALGDHNLSQDDLNEIAKDITLIKDEIKLKKALAKYDLNQNQIDSLSKLEFKDHLNISFKALKLITPLMLEGKKYDEACNELNLKVAINEDKKDFLPAFNETYYKDEVTNPVVLRAIKEYRKVLNALLKKYGKVHKINIELAREVGKNHSQRAKIEKEQNENYKAKKDAELECEKLGLKINSKNILKLRLFKEQKEFCAYSGEKIKISDLQDEKMLEIDHIYPYSRSFDDSYMNKVLVFTKQNQEKLNKTPFEAFGNDSAKWQKIEVLAKNLPTKKQKRILDKNYKDKEQKDFKDRNLNDTRYIARLVLNYTKDYLDFLPLSDDENTKLNDTQKGSKVHVEAKSGMLTSALRHTWGFSTKDRNNHLHHAIDAVIIAYANNSIVKAFSDFKKEQESNSAELYAKKISELDYKNKRKFFEPFSGFRQKVLDKIDEIFVSKPERKKPSGALHEETFRKEEEFYQSYGGKEGVLKALELGKIRKVNGKIVKNGDMFRVDIFKHKKTNKFYAVPIYTMDFALKVLPNKAVARSKKGEIKDWILMDENYEFCFSLYKDSLILIQTKDMQEPEFVYYNAFTSSTVSLIVSKHDNKFETLSKNQKILFKNANEKEVIAKSIGIQNLKVFEKYIVSALGEVTKAEFRQREDFKK

SEQ ID NO: 886 - protein, 987 aa, Campylobacter jejuni
MARILAFDIGISSIGWAFSENDELKDCGVRIFTKAENPKTGESLALPRRLARSARKRLARRKARLNHLKHLIANEFKLNYEDYQSFDESLAKAYKGSLISPYELRFRALNELLSKQDFARVILHIAKRRGYDDIKNSDDKEKGAILKAIKQNEEKLANYQSVGEYLYKEYFQKFKENSKEFTNVRNKKESYERCIAQSFLKDELKLIFKKQREFGFSFSKKFEEEVLSVAFYKRALKDFSHLVGNCSFFTDEKRAPKNSPLAFMFVALTRIINLLNNLKNTEGILYTKDDLNTLLNEVLKNGTLTYKQTKKLLGLSDDYEFKGEKGTYFIEFKKYKEFIKSLGDHSLSQDDLNEIAKDITLIKDEIKLKKALAKYDLNQNQIDSLSKLEFKDHLNISFKALKLITPLMLEGKKYDEACNELNLKVAINEDKKDFLPAFNETYYKDEVTNPVVLRAIKEYRKVLNALLKKYGKVHKINIELAREVGKNHSQRAKIEKEQNENYKAKKDAELECEKLGLKINSKNILKLRLFKEQKEFCAYSGEKIKISDLQDEKMLEIDHIYPYSRSFDDSYMNKVLVFTKQNQEKLNQTPFEAFGNDSAKWQKIEVLAKNLPTKKQKRILDKNYKDKEQKNFKDRNLNDTRYIARLVLNYTKDYLDFLPLSDDENTKLNDTQKGSKVHVEAKSGMLTSALRHTWGFSAKDRNNHLHHAIDAVIIAYANNSIVKAFSDFKKEQESNSAELYAKKISELDYKNKRKFFEPFSGFRQKVLDKIDEIFVSKPERKKPSGALHEETFRKEEEFYQSYGGKEGVLKALELGKIRKVNGKIVKNGDMFRVDIFKHKKTNKFYAVPIYTMDFALKVLPNKAVARSKKGEIKDWILMDENYEFCFSLYKDSLILIQTKDMQEPEFVYYNAFTSSTVSLIVSKHDNKFETLSKNQKILFKNANEKEVIAKSIGIQNLKVFEKYIVSALGEVTKAEFRQREDFKNELR

SEQ ID NO: 887 - protein, 987 aa, Campylobacter jejuni
MARILAFDIGISSIGWAFSENDELKDCGVRIFTKAENPKTGESLALPRRLARSARKRLARRKARLNHLKHLIANEFKLNYEDYQSFDESLAKAYKGSLISPYELRFRALNELLSKQDFARVILHIAKRRGYDDIKNSDDKEKGAILKAIKQNEEKLANYQSVGEYLYKEYFQKFKENSKEFTNVRNKKESYERCIAQSFLKDELKLIFKKQREFGFSFSKKFEEEVLSVAFYKRALKDFSHLVGNCSFFTDEKRAPKNSPLAFMFVALTRIINLLNNLKNTEGILYTKDDLNALLNEVLKNGTLTYKQTKKLLGLSDDYEFKGEKGTYFIEFKKYKEFIKALGDHSLSQDDLNEIAKDITLIKDEIKLKKALVKYDLNQNQIDSLSKLEFKDHLNISFKALKLITPLMLEGKKYDEACNELNLKVAINEDKKDFLPAFNETYYKDEVTNPVVLRAIKEYRKVLNALLKKYGKVHKINIELAREVGKNYSQRAKIEKEQNENYKAKKDAELECEKLGLKINSKNILKLRLFKEQKEFCAYSGEKIKISDLQDEKMLEIDHIYPYSRSFDDSYMNKVLVFTKQNQEKLNQTPFEAFGNDSAKWQKIEVLAKNLPTKKQKRILDKNYKDKEQKDFKDRNLNDTRYIARLVLNYTKDYLDFLPLSDDENTKLNDTQKGSKVHVEAKSGMLTSALRHTWGFSAKDRNNHLHHAIDAVIIAYANNSIVKAFSDFKKEQESNSAELYAKKISELDYKNKRKFFEPFSGFRQKVLDKIDEIFVSKPERKKPSGALHEETFRKEEEFYQSYGGKEGVLKALELGKIRKVNGKIVKNGDMFRVDIFKHKKTNKFYAVPIYTMDFALKVLPNKAVARSKKGEIKDWILMDENYEFCFSLYKDSLILIQTKDMQEPELVYFNAFTSSTVSLIVSKHDNKFETLSKNQKILFKNANEKEVIAKSIGIQNLKVFEKYIVSALGEVTKAEFRQREDFKNELR

SEQ ID NO: 888 - protein, 983 aa, Campylobacter jejuni; identical to SEQ ID NO: 231

SEQ ID NO: 889 - protein, 987 aa, Campylobacter jejuni
MARILAFDIGISSIGWAFSENDELKDCGVRIFTKAENPKTGESLALPRRLARSARKRLARRKARLNHLKHLIANEFKLNYEDYQSFDESLAKAYKGSLISPYELRFRALNELLSKQDFARVILHIAKRRGYDDIKNSDDKEKGAILKAIKQNEEKLVNYQSVGEYLYKEYFQKFKENSKEFTNVRNKKESYERCIAQSFLKDELKLIFKKQREFGFSFSKKFEEEVLSVAFYKRALKDFSHLVGNCSFFTDEKRAPKNSPLAFMFVALTRIINLLNNLKNTEGILYTKDDLNALLNEVLKNGTLTYKQTKKLLGLSDDYEFKGEKGTYFIEFKKYKEFIKALGDHSLSQDDLNEIAKDITLIKDEIKLKKALAKYDLNQNQIDSLSKLEFKDHLNISFKALKLITPLMLEGKKYDEACNELNLKVAINEDKKDFLPAFNETYYKDEVTNPVVLRAIKEYRKVLNALLKKYGKVHKINIELAREVGKNYSQRAKIEKEQNENYKAKKDAELECEKLGLKINSKNILKLRLFKEQKEFCAYSGEKIKISDLQDEKMLEIDHIYPYSRSFDDSYMNKVLVFTKQNQEKLNQTPFEAFGNDSAKWQKIEVLAKNLPTKKQKRILDKNYKDKEQKDFKDRNLNDTRYIARLVLNYTKDYLDFLPLSDDENTKLNDTQKGSKVHVEAKSGMLTSALRHTWGFSAKDRNNHLHHAIDAVIIAYANNSIVKAFSDFKKEQESNSAELYAKKISELDYKNKRKFFEPFSGFRQKVLDKIDEIFVSKPERKKPSGALHEETFRKEEEFYQSYGGKEGVLKALELGKIRKVNGKIVKNGDMFRVDIFKHKKTNKFYAVPIYTMDFALKVLPNKAVARSEKGEIKDWILMDENYEFCFSLYKDSLILIQTKDMQEPELVYFNAFTSSTVSLIVSKHDNKFETLSKNQKILFKNANEKEVIAKSIGIQNLKVFEKYIVSALGEVTKAEFRQREDFKNELR

SEQ ID NO: 890 - protein, 987 aa, Campylobacter jejuni
MARILAFDIGISSIGWAFSENDELKDCGVRIFTKAENPKTGESLALPRRLARSARKRLARRKARLNHLKHLIANEFKLNYEDYQSFDESLAKAYKGSLISPYELRFRALNELLSKQDFARVILHIAKRRGYDNIKNSDNEEKSEILKAIKQNEEKLVNYQSVGEYLYKEYFQKFKENSKEFINVRNKKESYERCIAQSFLKDELKLIFQKQREFGLSFSKKFEEEVLSVAFYKRALKDFSHLVGNCSFFTDEKRAPKNSPLAFMFVALTRIINLLNNLKNTEGILYTKDDLNTLLNEVLKNGTLTYKQTKKLLGLSDDYEFKGEKGTYFIEFKKYKEFIKALGDHSLSQDDLNEIAKDITLIKDEIKLKKALAKYDLNQNQIDSLSKLEFKDHLNISFKALKLITPLMLEGKKYDEACNELNLKVVINEDKKDFLPAFNETYYKDEVTNPVVLRAIKEYRKVLNALLKKYGKVHKINIELAREVGKNHSQRAKIEKEQNENYKAKKDAELECEKLGLKINNKNILKLRLFKEQKEFCAYSGEKIKLSDLQDEKMLEIDHIYPYSRSFDDSYMNKVLVFTKQNQEKLNKTPFEAFGNDSTKWQKIEVLAKNLPTKKQKRILDKNYKDKEQKDFKDRNLNDTRYIARLVLNYTKDYLDFLPLSDDENTKLNDIQKGSKVHVEAKSGMLTSALRHTWGFSTKDRNNHLHHAIDAVIIAYANNSIVKAFSDFKKEQESNSAELYAKKISELDYKNKRKFFEPFSGFRQKVLDKIDEIFVSKPERKKPSGALHEETFRKEEEFYQSYGGKEGVLKALELGKIRKVNGKIVKNGDMFRVDIFKHKKTNKFYAVPIYTMDFALKVLPNKAVVQGKDKKSGLIKDWILMDENYEFCFSLYKDSLILIQTKDMQEPEFVYYNAFTSSTVSLIVSKHDNKFETLSKNQKILFKNANEKEVIAKSIGIQNLKVFEKYIVSALGEVTKAEFRQREDFKK

SEQ ID NO: 891 - protein, 984 aa, Campylobacter jejuni
MARILAFDIGISSIGWAFSENDELKDCGVRIFTKAENPKTGESLALPRRLARSARKRLARRKARLNHLKHLIANEFKLNYEDYQSFDESLAKAYKGSLISPYELRFRALNELLSKQDFARVILHIVKRRGYDDIKNSDDKEKGAILKAIKQNEEKLANYQSVGEYLYKEYFQKFKENSKEFTNVRNKKESYERCIAQSFLKDELKLIFKKQREFGFSFSKKFEEEVLSVAFYKRALKDFSHLVGNCSFFTDEKRAPKNSPLAFMFVALTRIINLLNNLKNTEGILYTKDDLNTLLNEVLKNGTLTYKQTKKLLGLSDDYEFKGEKGTYFIEFKKYKEFIKALGDHSLSQDDLNEIAKDITLIKDEIKLKKALAKYDLNQNQIDSLSKLEFKDHLNISFKALKLITPLMLEGKKYDEACNELNLKVAINEDKKDFLPAFNETYYKDEVTNPVVLRAIKEYRKVLNALLKKYGKVHKINIELAREVGKNHSQRAKIEKEQNENYKAKKDAEFECEKLGLKINSKNILKLRLFKEQKEFCAYSGEKIKISDLQDEKMLEIDHIYPYSRSFDDSYMNKVLVFTKQNQEKLNKTPFEAFGNDSAKWQKIEVLAKNLPTKKQKRILDKNYKDKEQKDFKDRNLNDTRYIARLVLNYTKDYLDFLPLSDDENTKLNDTQKGSKVHVEAKSGMLTSALRHTWGFSTKDRNNHLHHAIDAVIIAYANNSIVKAFSDFKKEQESNSAELYAKKISELDYKNKRKFFEPFSGFRQKVLDKIDEIFVSKPERKKPSGALHEETFRKEEEFYQSYGGKEGVLKALELGKIRKVNGKIVKNGDMFRVDIFKHKKTNKFYAVPIYTMDFALKVLPNKAVARSKKGEIKDWILMDENYEFCFSLYKDSLILIQTKDMQEPEFVYYNAFTSSTVSLIVSKHDNKFETLSKNQKILFKNANEKEVIAKSIGIQNLKVFEKYIVSALGEVTKAEFRQREDFKK

SEQ ID NO: 892 - protein, 984 aa, Campylobacter jejuni
MARILAFDIGISSIGWAFSENDELKDCGVRIFTKAENPKTGESLALPRRLARSARKRLARRKARLNHLKHLIANEFKLNYEDYQSFDESLAKAYKGSLISPYELRFRALNELLSKQDFARVILHIVKRRGYDDIKNSDDKEKGTILKAIKQNEEKLANYQSVGEYLYKEYFQKFKENSKEFTNVRNKKESYERCIAQSFLKDELKLIFKKQREFGFSFSKKFEEEVLSVAFYKRALKDFSHLVGNCSFFTDEKRAPKNSPLAFMFVALTRIINLLNNLKNTEGILYTKDDLNTLLNEVLKNGTLTYKQTKKLLGLSDDYEFKGEKGTYFIEFKKYKEFIKALGEHNLSQDDLNEIAKDITLIKDEIKLKKALAKYDLNQNQIDSLSKLEFKDHLNISFKALKLITPLMLEGKKYDEACNELNLKVAINEDKKDFLPAFNETYYKDEVTNPVVLRAIKEYRKVLNALLKKYGKVHKINIELAREVGKNYSQRAKIEKEQNENYKAKKDAELECEKLGLKINSKNILKLRLFKEQKEFCAYSGEKIKISDLQDEKMLEIDHIYPYSRSFDDSYMNKVLVFTKQNQEKLNQTPFEAFGNDSAKWQKIEVLAKNLPTKKQKRILDKNYKDKEQKDFKDRNLNDTRYIARLVLNYTKDYLDFLPLSDDENTKLNDTQKGSKVHVEAKSGMLTSALRHTWGFSAKDRNNHLHHAIDAVIIAYANNSIVKAFSDFKKEQESNSAELYAKKISELDYKNKRKFFEPFSGFRQKVLDKIDEIFVSKPERKKPSGALHEETFRKEEEFYQSYGGKEGVLKALELGKIRKVNGKIVKNGDMFRVDIFKHKKTNKFYAVPIYTMDFALKVLPNKAVARSKKGEIKDWILMDENYEFCFSLYKDSLILIQTKDMQEPEFVYYNAFTSSTVSLIVSKHDNKFETLSKNQKILFKNANEKEVIAKSIGIQNLKVFEKYIVSALGEVTKAEFRQREDFKK

SEQ ID NO: 893 - protein, 987 aa, Campylobacter jejuni
MARILAFDIGISSIGWAFSENDELKDCGVRIFTKAENPKTGESLALPRRLARSARKRLARRKARLNHLKHLIANEFKLNYEDYQSFNESLAKAYKGSLISPYELRFRALNELLSKQDFARVILHIAKRRGYDDIKNSDDKEKGAILKVIKQNEEKLANYQSVGEYLYKEYFQKFKENSKEFTNVRNKKESYERCIAQSFLKDELKLIFQKQREFGFSFSKKFEEEVLSVAFYKRALKDFSHLVGNCSFFTDEKRAPKNSPLAFMFVALTRIINLLNNLKNTEGILYTKDDLNALLNEVLKNGTLTYKQTKKLLGLSDDYEFKGEKGTYFIEFKKYKEFIKALGDHSLSQDDLNEIAKDITLIKDEIKLKKALAKYDLNQNQIDSLSKLEFKDHLNISFKALKLITPLMLEGKKYDEACNELNLKVAINEDKKDFLPAFNETYYKDEVTNPVVLRAIKEYRKVLNALLKKYGKVHKINIELAREVGKNYSQRAKIEKEQNENYKAKKDAELECEKLGLKINSKNILKLRLFKEQKEFCAYSGEKIKISDLQDEKMLEIDHIYPYSRSFDDSYMNKVLVFTKQNQEKLNQTPFEAFGNDSAKWQKIEVLAKNLPTKKQKRILDKNYKDKEQKDFKDRNLNDTRYIARLVLNYTKDYLDFLPLSDDENTKLNDTQKGSKVHVEAKSGMLTSALRHTWGFSAKDRNNHLHHAIDAVIIAYANNSIVKAFSDFKKEQESNSAELYAKKISELDYKNKRKFFEPFSGFRQKVLDKIDEIFVSKPERKKPSGALHEETFRKEEEFYQSYGGKEGVLKALELGKIRKVNGKIVKNGDMFRVDIFKHKKTNKFYAVPIYTMDFALKVLPNKAVARSKKGEIKDWILMDENYEFCFSLYKDSLILIQTKDMQEPELVYFNAFTSSTVSLIVSKHDNKFETLSKNQKILFKNANEKEVIAKSIGIQNLKVFEKYIVSALGEVTKAEFRQREDFKNELR

SEQ ID NO: 894 - protein, 984 aa, Campylobacter jejuni
MARILAFDIGISSIGWAFSENDELKDCGVRIFTKAENPKTGESLALPRRLARSARKRLARRKARLNRLKHLIANEFKLNYEDYQSFDESLAKAYKGSLISPYELRFRALNELLSKQDFARVILHIAKRRGYDDIKNSDDKEKGAILKAIKQNEEKLANYQSVGEYLYKEYFQKFKENSKEFTNVRNKKESYERCIAQSFLKDELKLIFKKQREFGFSFSKKFEEEVLSVAFYKRALKDFSHLVGNCSFFTDEKRAPKNSPLAFMFVALTRIINLLNNLKNTEGILYTKDDLNALLNEVLKNGTLTYKQTKKLLGLSDDYEFKGEKGTYFIEFKKYKEFIKALGDHSLNQDDLNEIAKDITLIKDEIKLKKALAKYDLNQNQIDSLSKLEFKDHLNISFKALKLITPLMLEGKKYDEACNELNLKVAINEDKKDFLPAFNETYYKDEVTNPVVLRAIKEYRKVLNALLKKYGKVHKINIELAREVGKNYSQRAKIEKEQNENYKAKKDAELECEKLGLKINSKNILKLRLFKEQKEFCVYSGEKIKISDLQDEKMLEIDHIYPYSRSFDDSYMNKVLVFTKQNQEKLNQTPFEAFGNDSAKWQKIEVLAKNLPTKKQKRILDKNYKDKEQKDFKDRNLNDTRYIARLVLNYTKDYLDFLPLSDDENTKLNDTQKGSKVYVEAKSGMLTSALRHTWGFSTKDRNNHLHHAIDAVIIAYANNSIVKAFSDFKKEQESNSAELYAKKISELDYKNKRKFFEPFSGFRQKVLDKIDEIFVSKPERKKPSGALHEETFRKEEEFYQSYGGKEGVLKALELGKIRKVNGKIVKNGDMFRVDIFKHKKTNKFYAVPIYTMDFALKVLPNKAVARSKKGEIKDWILMDENYEFCFSLYKDSLILIQTKDMQEPEFVYYNAFTSSTVSLIVSKHDNKFETLSKNQKILFKNANEKEVIAKSIGIQNLKVFEKYIVSALGEVTKAEFRQREDFKK

SEQ ID NO: 895 - protein, 984 aa, Campylobacter jejuni
MARILAFDIGISSIGWAFSENDELKDCGVRIFTKVENPKTGESLALPRRLARSARKRLARRKARLNHLKHLIANEFKLNYEDYQSFDESLAKAYKGSLISPYELRFRALNELLSKQDFARVILHIAKRRGYDDIKNSDDKEKGAILKAIKQNEEKLANYQSVGEYLYKEYFQKFKENSKEFTNVRNKKESYERCIAQSFLKDELKLIFKKQREFGFSFLKKFEEEVLSVAFYKRALKDFSHLVGNCSFFTDEKRAPKNSPLAFMFVALTRIINLLNNLKNTEGILYTKDDLNALLNEVLKNGTLTYKQTKKLLGLSDDYEFKGEKGTYFIEFKKYKEFIKALGEHNLSQDDLNEIAKDITLIKDEIKLKKALAKYDLNQNQIDSLSKLEFKDHLNISFKALKLITPLMLEGKKYDEAYNELNLKVAINEDKKDFLPAFNETYYKDEVTNPVVLRAIKEYRKVLNALLKKYGKVHKINIELAREVGKNHSQRAKIEKEQNENYKAKKDAELECEKLGLKINSKNILKLRLFKEQKEFCAYSGEKIKISDLQDEKMLEIDHIYPYSRSFDDSYMNKVLVFTKQNQEKLNQTPFEAFGNDSAKWQKIEVLAKNLPTKKQKRILDKNYKDKEQKDFKDRNLNDTRYIARLVLNYTKDYLDFLPLSDDENTKLNDTQKGSKVHVEAKSGMLTSALRHTWGFSAKDRNNHLHHAIDAVIIAYANNSIVKAFSDFKKEQESNSAELYAKKISELDYKNKRKFFEPFSGFRQKVLDKIDEIFVSKPERKKPSGALHEETFRKEEEFYQSYGGKEGVLKALELGKIRKVNGKIVKNGDMFRVDIFKHKKTNKFYAVPIYTMDFALKVLPNKAVARSKKGEIKDWILMDENYEFCFSLYKDSLILIQTKDMQEPELVYFNAFTSSTVSLIVSKHDNKFETLSKNQKILFKNANEKEVIAKSIGIQNLKVFEKYIVSALGEVTKAEFRQREDFKK

SEQ ID NO: 896 - protein, 984 aa, Campylobacter jejuni
MARILAFDIGISSIGWAFSENDELKDCGVRIFTKVENPKTGESLALPRRLARSARKRLARRKARLNHLKHLIANEFKLNYEDYQSFDESLAKAYKGSLISPYELRFRALNELLSKQDFARVILHIAKRRGYDDIKNSDDKEKGAILKAIKQNEEKLANYQSVGEYLYKEYFQKFKENSKEFTNVRNKKESYERCIAQSFLKDELKLIFKKQREFGFSFSKKFEEEVLSVAFYKRALKDFSHLVGNCSFFTDEKRAPKNSPLAFMFVALTRIINLLNNLKNTEGILYTKDDLNALLNEVLKNGTLTYKQTKKLLGLSDDYEFKGEKGTYFIEFKKYKEFIKALGEHNLSQDDLNEIAKDITLIKDEIKLKKALAKYDLNQNQIDSLSKLEFKDHLNISFKALKLITPLMLEGKKYDEACNELNLKVAINEDKKDFLPAFNETYYKDEVTNPVVLRAIKEYRKVLNALLKKYGKVHKINIELAREVGKNHSQRAKIEKEQNENYKAKKDAELECEKLGLKINSKNILKLRLFKEQKEFCAYSGEKIKISDLQDEKMLEIDHIYPYSRSFDDSYMNKVLVFTKQNQEKLNKTPFEAFGNDSAKWQKIEVLAKNLPTKKQKRILDKNYKDKEQKDFKDRNLNDTRYIARLVLNYTKDYLDFLPLSNDENTKLNDTQKGSKVHVEAKSGMLTSALRHTWGFSTKDRNNHLHHAIDAVIIAYANNSIVKAFSDFKKEQESNSAELYAKKISELDYKNKRKFFEPFSGFRQKVLDKIDEIFVSKPERKKPSGALHEETFRKEEEFYQSYGGKEGVLKALELGKIRKVNGKIVKNGDMFRVDIFKHKKTNKFYAVPIYTMDFALKVLPNKAVARSKKGEIKDWILMDENYEFCFSLYKDSLILIQTKDMQEPEFVYYNAFTSSTVSLIVSKHDNKFETLSKNQKILFKNANEKEVIAKSIGIQNLKVFEKYIVSALGEVTKAEFRQREDFKK

SEQ ID NO: 897 - protein, 984 aa, Campylobacter jejuni
MARILAFDIGISSIGWAFSENDELKDCGVRIFTKVENPKTGESLALPRRLARSARKRLARRKARLNHLKHLIANEFKLNYEDYQSFDESLAKAYKGSLISPYELRFRALNELLSKQDFARVILHIAKRRGYDDIKNSDDKEKGAILKAIKQNEEKLANYQSVGEYLYKEYFQKFKENSKEFTNVRNKKESYERCIAQSFLKDELKLIFKKQREFGFSFSKKFEEEVLSVAFYKRALKDFSHLVGNCSFFTDEKRAPKNSPLAFMFVALTRIINLLNNLKNTEGILYTKDDLNALLNEVLKNGTLTYKQTKKLLGLSDDYEFKGEKGTYFIEFKKYKEFIKALGEHNLSQDDLNEIAKDITLIKDEIKLKKALAKYDLNQNQIDSLSKLEFKDHLNISFKALKLITPLMLEGKKYDEACNELNLKVAINEDKKDFLPAFNETYYKDEVTNPVVLRAIKEYRKVLNALLKKYGKVHKINIELAREVGKNHSQRAKIEKEQNENYKAKKDAELECEKLGLKINSKNILKLRLFKEQKEFCAYSGEKIKISDLQDEKMLEIDHIYPYSRSFDDSYMNKVLVFTKQNQEKLNKTPFEAFGNDSAKWQKIEVLAKNLPTKKQKRILDKNYKDKEQKDFKDRNLNDTRYIARLVLNYTKDYLDFLPLSDDENTKLNDTQKGSKVHVEAKSGMLTSALRHTWGFSTKDRNNHLHHAIDAVIIAYANNSIVKAFSDFKKEQESNSAELYAKKISELDYKNKRKFFEPFSGFRQKVLDKIDEIFVSKPERKKPSGALHEETFRKEEEFYQSYGGKEGVLKALELGKIRKVNGKIVKNGDMFRVDIFKHKKTNKFYAVPIYTMDFALKVLPNKAVARSKKGEIKDWILMDENYEFCFSLYKDSLILIQTKDMQEPEFVYYNAFTSSTVSLIVSKHDNKFETLSKNQKILFKNANEKEVIAKSIGIQNLKVFEKYIVSALGEVTKAEFRQREDFKK

SEQ ID NO: 898 - protein, 984 aa, Campylobacter jejuni
MARILAFDIGISSIGWAFSENDELKDCGVRIFTKVENPKTGESLALPRRLARSARKRLARRKARLNHLKHLIANEFKLNYEDYQSFDESLAKAYKGSLISPYELRFRALNELLSKQDFARVILHIAKRRGYDDIKNSDDKEKGAILKAIKQNEEKLANYQSVGEYLYKEYFQKFKENSKEFTNVRNKKESYERCIAQSFLKDELKLIFKKQREFGFSFSKKFEEEVLSVAFYKRALKDFSHLVGNCSFFTDEKRAPKNSPLAFMFVTLTRIINLLNNLKNTEGILYTKDDLNALLNEVLKNGTLTYKQTKKLLGLSDDYEFKGEKGTYFIEFKKYKEFIKALGEHNLSQDDLNEIAKDITLIKDEIKLKKALAKYDLNQNQIDSLSKLEFKDHLNISFKALKLITPLMLEGKKYDEACNELNLKVAINEDKKDFLPAFNETYYKDEVTNPVVLRAIKEYRKVLNALLKKYGKVHKINIELAREVGKNHSQRAKIEKEQNENYKAKKDAELECEKLGLKINSKNILKLRLFKEQKEFCAYSGEKIKISDLQDEKMLEIDHIYPYSRSFDDSYMNKVLVFTKQNQEKLNKTPFEAFGNDSAKWQKIEVLAKNLPTKKQKRILDKNYKDKEQKDFKDRNLNDTRYIARLVLNYTKDYLDFLPLSDDENTKLNDTQKGSKVHVEAKSGMLTSALRHTWGFSTKDRNNHLHHAIDAVIIAYANNSIVKAFSDFKKEQESNSAELYAKKISELDYKNKRKFFEPFSGFRQKVLDKIDEIFVSKPERKKPSGALHEETFRKEEEFYQSYGGKEGVLKALELGKIRKVNGKIVKNGDMFRVDIFKHKKTNKFYAVPIYTMDFALKVLPNKAVARSKKGEIKDWILMDENYEFCFSLYKDSLILIQTKDMQEPEFVYYNAFTSSTVSLIVSKHDNKFETLSKNQKILFKNANEKEVIAKSIGIQNLKVFEKYIVSALGEVTKAEFRQREDFKK

SEQ ID NO: 899 - protein, 984 aa, Campylobacter jejuni
MARILAFDIGISSIGWAFSENDELKDCGVRIFTKVENPKTGESLALPRRLARSARKRLARRKARLNHLKHLIANEFKLNYEDYQSFDESLAKAYKGSLISPYELRFRALNELLSKQDFARVILHIAKRRGYDDIKNSDDKEKGAILKAIKQNEEKLANYQSVGEYLYKEYFQKFKENSKEFTNVRNKKESYERCIAQSFLKDELKLIFKKQREFGFSFSKKFEEEVLSVAFYKRALKDFSHLVGNCSFFTDEKRAPKNSPLAFMFVALTRIINLLNNLKNTEGILYTKDDLNALLNEVLKNGTLTYKQTKKLLGLSDDYEFKGEKGTYFIEFKKYKEFIKALGEHNLSQDDLNEIAKDITLIKDEIKLKKALAKYDLNQNQIDSLSKLEFKDHLNISFKALKLITPLMLEGKKYDEACNELNLKVAINEDKKDFLPAFNETYYKDEVTNPVVLRAIKEYRKVLNALLKKYGKVHKINIELAREVGKNHSQRAKIEKEQNENYKAKKDAELECEKLGLKINSKNILKLRLFKEQKEFCAYSGEKIKISDLQDEKMLEIDHIYPYSRSFDDSYMNKVLVFTKQNQEKLNKTPFEAFGNDSAKWQKIEVLAKNLPTKKQKRILDKNYKDKEQKDFKDRNLNDTRYIARLVLNYTKDYLDFLPLSDDENTKLNDTQKGSKVHVEAKSGMLTSALRHTWGFSTKDRNNHLHHAIDAVIIAYANNSIVKAFSDFKKEQESNSAELYAKKISELDYKNKRKFFEPFSGFRQKVLDKIDEIFVSKPERKKPSGALHEETFRKEEEFYQSYGGKEGVLKALELGKIRKVNGKIVKNGDMFRVDIFKHKKTNKFYAVPIYTMDFALKVLPNKAVARSKKGEIKDWILMDENYEFCFSLYKDSLILIQTKDMQEPEFVYYNAFTSSTVSLIVSKHDNKFETLSKNQKILFKNANEKEVIAKSIGIQNLKVFEKYIVSALGEVTKAEFIQREDFKK

SEQ ID NO: 900 - protein, 987 aa, Campylobacter jejuni
MARILAFDIGISSIGWAFSENDELKDCGVRIFTKVENPKTGESLALPRRLARSARKRLARRKARLNHLKHLIANEFKLNYEDYQSFDESLAKAYKGSLISPYELRFRALNELLSKQDFARVILHIAKRRGYDDIKNSDDKEKGAILKAIKQNEEKLANYQSVGEYLYKEYFQKFKENSKEFTNVRNKKESYERCIAQSFLKDELKLIFKKQREFGFSFSKKFEEEVLSVAFYKRALKDFSHLVGNCSFFTDEKRVPKNSPLAFMFVALTRIINLLNNLKNTEGILYTKDDLNALLNEVLKNGTLTYKQTKKLLGLSDDYEFKGEKGTYFIEFKKYKEFIKALGEHNLSQDDLNEIAKDITLIKDEIKLKKALAKYDLNQNQIDSLSKLEFKDHLNISFKALKLITPLMLEGKKYDEACNELNLKVAINEDKKDFLPAFNETYYKDEVTNPVVLRAIKEYRKVLNALLKKYGKVHKINIELAREVGKNHSQRAKIEKEQNENYKAKKDAELECEKLGLKINSKNILKLRLFKEQKEFCAYSGEKIKISDLQDEKMLEIDHIYPYSRSFDDSYMNKVLVFTKQNQEKLNQTPFEAFGNDSAKWQKIEVLAKNLPTKKQKRILDKNYKDKEQKNFKDRNLNDTRYIARLVLNYTKDYLDFLPLSDDENTKLNDTQKGSKVHVEAKSGMLTSALRHTWGFSAKDRNNHLHHAIDAVIIAYANNSIVKAFSDFKKEQESNSAELYAKKISELDYKNKRKFFEPFSGFRQKVLDKIDEIFVSKPERKKPSGALHEETFRKEEEFYQSYGGKEGVLKALELGKIRKVNGKIVKNGDMFRVDIFKHKKTNKFYGVPIYTMDFALKVLPNKAVARSKKGEIKDWILMDENYEFCFSLYKDSLILIQTKDMQEPEFVYYNAFTSSTVSLIVSKHDNKFETLSKNQKILFKNANEKEVIAKSIGIQNLKVFEKYIVSALGEVTKAEFRQREDFKNELR

SEQ ID NO: 901 - protein, 984 aa, Campylobacter jejuni
MARILAFDIGISSIGWAFSENDELKDCGVRIFTKVENPKTGESLALPRRLARSARKRLARRKVRLNHLKHLIANEFKLNYEDYQSFDESLAKAYKGSLISPYELRFRALNELLSKQDFARVILHIAKRRGYDDIKNSDDKEKGAILKAIKQNEEKLANYQSVGEYLYKEYFQKFKENSKEFTNVRNKKESYERCIAQSFLKDELKLIFKKQREFGFSFSKKFEEEVLSVAFYKRALKDFSHLVGNCSFFTDEKRAPKNSPLAFMFVALTRIINLLNNLKNTEGILYTKDDLNALLNEVLKNGTLTYKQTKKLLGLSDDYEFKGEKGTYFIEFKKYKEFIKALGEHNLSQDDLNEIAKDITLIKDEIKLKKALAKYDLNQNQIDSLSKLEFKDHLNISFKALKLITPLMLEGKKYDEACNELNLKVAINEDKKDFLPAFNETYYKDEVTNPVVLRAIKEYRKVLNALLKKYGKVHKINIELAREVGKNHSQRAKIEKEQNENYKAKKDAELECEKLGLKINSKNILKLRLFKEQKEFCAYSGEKIKISDLQDEKMLEIDHIYPYSRSFDDSYMNKVLVFTKQNQEKLNKTPFEAFGNDSAKWQKIEVLAKNLPTKKQKRILDKNYKDKEQKDFKDRNLNDTRYIARLVLNYTKDYLDFLPLSDDENTKLNDTQKGSKVHVEAKSGMLTSALRHTWGFSTKDRNNHLHHAIDAVIIAYANNSIVKAFSDFKKEQESNSAELYAKKISELDYKNKRKFFEPFSGFRQKVLDKIDEIFVSKPERKKPSGALHEETFRKEEEFYQSYGGKEGVLKALELGKIRKVNGKIVKNGDMFRVDIFKHKKTNKFYAVPIYTMDFALKVLPNKAVARSKKGEIKDWILMDENYEFCFSLYKDSLILIQTKDMQEPEFVYYNAFTSSTVSLIVSKHDNKFETLSKNQKILFKNANEKEVIAKSIGIQNLKVFEKYIVSALGEVTKAEFRQREDFKK

SEQ ID NO: 902 - protein, 721 aa, Campylobacter jejuni
MFVALTRIINLLNNLKNTEGILYTKDDLNTLLNEVLKNGTLTYKQTKKLLGLSDDYEFKGEKGTYFIEFKKYKEFIKALGDHSLSQDDLNEIAKDITLIKDEIKLKKALAKYDLNQNQIDSLSKLEFKDHLNISFKALKLITPLMLEGKKYDEACNELNLKVAINEDKKDFLPAFNETYYKDEVTNPVVLRAIKEYRKVLNALLKKYGKVHKINIELAREVGKNYSQRAKIEKEQNENYKAKKDAELECEKLGLKINSKNILKLRLFKEQKEFCAYSGEKIKISDLQDEKMLEIDHIYPYSRSFDDSYMNKVLVFTKQNQEKLNQTPFEAFGNDSAKWQKIEVLAKNLPTKKQKRILDKNYKDKEQKDFKDRNLNDTRYIARLVLNYTKDYLDFLPLSDDENTKLNNTQKGSKVYVEAKSGMLTSALRHTWGFSTKDRNNHLHHAIDAVIIAYANNSIVKAFSDFKKEQESNSAELYAKKISELDYKNKRKFFEPFSGFRQKVLDKIDEIFVSKPERKKPSGALHEETFRKEEEFYQSYGGKEGVLKALELGKIRKVNGKIVKNGDMFRVDIFKHKKTNKFYAVPIYTMDFALKVLPNKAVARSKKGEIKDWILMDENYEFCFSLYKDSLILIQTKDMQEPEFVYYNAFTSSTVSLIVSKHDNKFETLSKNQKILFKNANEKEVIAKSIGIQNLKVFEKYIVSALGEVTKAEFRQREDFKK

SEQ ID NO: 903 - protein, 512 aa, Campylobacter jejuni
MHKINIELAREVGKNHSQRAKIEKEQNENYKAKKDAEIECEKLGLKINSKNILKLRLFKEQKEFCAYSGEKIKLSDLQDEKMLEIDHIYPYSRSFDDSYMNKVLVFTKQNQEKLNKTPFEAFGNDSTKWQKIEVLAKNLPEKKQKRILDKNYKDKEQKDFKDRNLNDTRYIARLVLNYTKDYLDFLPLSDDENTKLNDTQKGSKVHVEAKSGMLTSALRHTWGFSAKDRNNHLHHAIDAAIIAYANNSIVKAFSDFKKEQESNSVELYAKKISELDYKNKRKFFEPFSGFRQKVLDKIDEIFVSKPERKKPSGALHEETFRKEEEFYQSYGGKEGVLKALELGKIRKVNGKIVKNGDMFRVDIFKHKKTNKFYAVPIYTMDFALKVLPNKAVARSKKGEIKDWILMDENYEFCFSLYKDSLILIQTKDMQEPELVYFNAFTSSTVSLIVSKHDNKFETLSKNQKILFKNANEKEVIAKSIGIQNLKVFEKYIVSALGEVTKAEFRQREDFKK

SEQ ID NO: 904 - protein, 965 aa, Campylobacter jejuni
MKIIGFNLGIANIGWALRENDEIIDCGVRVFDIPENPKNGNSLALERRENKARMKIVKRKKARMLATKTFLKKELNVDLSKLFLIGSTQSIYELRAKALSSLISKEELSAIILHIAKHRGYDDSALKNENGTIIEALNKNKETMLKFKSVGEYFYKNFVQNKEVKKIRNTTEDYSNSVPRSLLKQELDLILDKQKELGLIKNADFKEKLFEIIFFKRPLKDFSNKIGNCIFFENEKRAAKNTISACEFVALGKVVNLLKSIEKDIGIVYEKDSINEIMSIILDKTSISYKKIRDILNLPQEINFKGLDYSKNNVENSKLVDLKKLNEFKKALGDGFANLDKDILDSIATDITLTKDTATLKEKLKNYNVLNAEQIEKLSELVFNDHINLSLKALKQIIPLMYEGKRYDEACELCNFTIAKNQEKSEYLPLFEKTRFAKDISSPVVIRAICEFRKLLNDIIRRYGSVHKIHLELTRDFGISFSDRKKIIKEIEQNEQSRIKALETIKELKLEETSKNIQIVRLFEDQKGICPYSGLKMDLNRLDELVIDYIRPYNRSLDDSYSNKVLTFKKLSDLKQGKTPFEAFGEDEKLWAEINERIKEYNGKKRFKIFDKFFKDKKPFDFTEQTLQDTRWLTKLVASYLNEYLSFLPISEDENTALGYGEKGSKQHVILSSGMITQMLRNFWYLGFKNHKDYKNNAMDAIIVAFTTNSIIFAFNNFKKELDLAKAEFYANKISESDYLLKRKFLPPFSGFKEQALEKVKNIFVSHSLKIKNKGTLHDLTPLKIKELKNTYGDLDLAVKLGKIRKYNDKYYANANGSLVRADLFVDKKNKFHAVSIYKADFSTKKLPNKTPATTSNGETKEGIEMNENYNFCMSLYKNTPISVKIKGMKEPIICYYHGFNTSGSKITYKKHDNNYHNLSEDEMVVFRKNDKESIAVGKILEIKKYSISPSGELSLIENEERKWF

SEQ ID NO: 905 - protein, 759 aa, Campylobacter jejuni
MLSVAFYKRALKDFSHLVGNCSFFTDEKRAPKNSPLAFMFVALTRIINLLNNLKNTEGILYTKDDLNALLNEVLKNGTLTYKQTKKLLGLSDDYEFKGEKGTYFIEFKKYKEFIKALGEHNLSQDDLNEIAKDITLIKDEIKLKKALAKYDLNQNQIDSLSKLEFKDHLNISFKALKLITPLMLEGKKYDEACNELNLKVAINEDKKDFLPAFNETYYKDEVTNPVVLRAIKEYRKVLNALLKKYGKVHKINIELAREVGKNHSQRAKIEKEQNENYKAKKDAELECEKLGLKINSKNILKLRLFKEQKEFCAYSGEKIKISDLQDEKMLEIDHIYPYSRSFDDSYMNKVLVFTKQNQEKLNKTPFEAFGNDSAKWQKIEVLAKNLPTKKQKRILDKNYKDKEQKDFKDRNLNDTRYIARLVLNYTKDYLDFLPLSDDENTKLNDTQKGSKVHVEAKSGMLTSALRHTWGFSTKDRNNHLHHAIDAVIIAYANNSIVKAFSDFKKEQESNSAELYAKKISELDYKNKRKFFESFSGFRQKVLDKIDEIFVSKPERKKPSGALHEETFRKEEEFYQSYGGKEGVLKALELGKIRKVNGKIVKNGDMFRVDIFKHKKTNKFYAVPIYTMDFALKVLPNKAVARSKKGEIKDWILMDENYEFCFSLYKDSLILIQTKDMQEPEFVYYNAFTSSTVSLIVSKHDNKFETLSKNQKILFKNANEKEVIAKSIGIQNLKVFEKYIVSALGEVTKAEFRQREDFKK

SEQ ID NO: 906 - protein, 984 aa, Campylobacter jejuni
MVRILAFDIGISSIGWAFSENDELKDCGVRIFTKVENPKTGESLALPRRLARSARKRLARRKARLNHLKHLIANEFKLNYEDYQSFDESLAKAYKGSLISPYELRFRALNELLSKQDFARVILHIAKRRGYDDIKNSDDKEKGAILKAIKQNEEKLANYQSVGEYLYKEYFQKFKENSKEFTNVRNKKESYERCIAQSFLKDELKLIFKKQREFGFSFSKKFEEEVLSVAFYKRALKDFSHLVGNCSFFTDEKRAPKNSPLAFMFVALTRIINLLNNLKNTEGILYTKDDLNALLNEVLKNGTLTYKQTKKLLGLSDDYEFKGEKGTYFIEFKKYKEFIKALGEHNLSQDDLNEIAKDITLIKDEIKLKKALAKYDLNQNQIDSLSKLEFKDHLNISFKALKLITPLMLEGKKYDEACNELNLKVAINEDKKDFLPAFNETYYKDEVTNPVVLRAIKEYRKVLNALLKKYGKVHKINIELAREVGKNHSQRAKIEKEQNENYKAKKDAELECEKLGLKINSKNILKLRLFKEQKEFCAYSGEKIKISDLQDEKMLEIDHIYPYSRSFDDSYMNKVLVFTKQNQEKLNKTPFEAFGNDSAKWQKIEVLAKNLPTKKQKRILDKNYKDKEQKDFKDRNLNDTRYIARLVLNYTKDYLDFLPLSDDENTKLNDTQKGSKVHVEAKSGMLTSALRHTWGFSTKDRNNHLHHAIDAVIIAYANNSIVKAFSDFKKEQESNSAELYAKKISELDYKNKRKFFEPFSGFRQKVLDKIDEIFVSKPERKKPSGALHEETFRKEEEFYQSYGGKEGVLKALELGKIRKVNGKIVKNGDMFRVDIFKHKKTNKFYAVPIYTMDFALKVLPNKAVARSKKGEIKDWILMDENYEFCFSLYKDSLILIQTKDMQEPEFVYYNAFTSSTVSLIVSKHDNKFETLSKNQKILFKNANEKEVIAKSIGIQNLKVFEKYIVSALGEVTKAEFRQREDFKK

SEQ ID NO: 907 - protein, 1003 aa, Campylobacter lari]
MRILGFDIGINSIGWAFVENDELKDCGVRIFTKAENPKNKESLALPRRNARSSRRRLKRRKARLIAIKRILAKELKLNYKDYVAADGELPKAYEGSLASVYELRYKALTQNLETKDLARVILHIAKHRGYMNKNEKKSNDAKKGKILSALKNNALKLENYQSVGEYFYKEFFQKYKKNTKNFIKIRNTKDNYNNCVLSSDLEKELKLILEKQKEFGYNYSEDFINEILKVAFFQRPLKDFSHLVGACTFFEEEKRACKNSYSAWEFVALTKIINEIKSLEKISGEIVPTQTINEVLNLILDKGSITYKKFRSCINLHESISFKSLKYDKENAENAKLIDFRKLVEFKKALGVHSLSRQELDQISTHITLIKDNVKLKTVLEKYNLSNEQINNLLEIEFNDYINLSFKALGMILPLMREGKRYDEACEIANLKPKTVDEKKDFLPAFCDSIFAHELSNPVVNRAISEYRKVLNALLKKYGKVHKIHLELARDVGLSKKAREKIEKEQKENQAVNAWALKECENIGLKASAKNILKLKLWKEQKEICIYSGNKISIEHLKDEKALEVDHIYPYSRSFDDSFINKVLVFTKENQEKLNKTPFEAFGKNIEKWSKIQTLAQNLPYKKKNKILDENFKDKQQEDFISRNLNDTRYIATLIAKYTKEYLNFLLLSENENANLKSGEKGSKIHVQTISGMLTSVLRHTWGFDKKDRNNHLHHALDAIIVAYSTNSIIKAFSDFRKNQELLKARFYAKELTSDNYKHQVKFFEPFKSFREKILSKIDEIFVSKPPRKRARRALHKDTFHSENKIIDKCSYNSKEGLQIALSCGRVRKIGTKYVENDTIVRVDIFKKQNKFYAIPIYAMDFALGILPNKIVITGKDKNNNPKQWQTIDESYEFCFSLYKNDLILLQKKNMQEPEFAYYNDFSISTSSICVEKHDNKFENLTSNQKLLFSNAKEGSVKVESLGIQNLKVFEKYIITPLGDKIKADFQPRENISLKTSKKYGLR

SEQ ID NO: 908 - protein, 372 aa, candidate division
DNESAINQIAYILTTQKADEGIRAELDSLPLSDKAKKAIVKIKPTNFKAFGHLSIKALQKITPHILEGMTYDKACEAAGYDFKKQSASLEQITNPVVKRAITQTLKVVRAIERKYGKPYFIKVETARDLAKNFKDRNAIKKENEENQGYNEDIKSIITNGYEASPKTKGGKQLLNHLKEFNVRLNKNADFNGQQIIKVKLYREQQGKCLYSGNPIDFETMLRDDNAYQVDHIVPFSRSNNDGITNKVLVFTEENQKKADRTPFEYFGTDERRWEKFVALVETTYKTRDVKTSDKATNAINYEYNGYAMKKKQNLLLQDYKNDSWNVRALNDTRYITRFIQNYLRQNVDFAEGEEKQRIIAPNGTTTAYLRKR

SEQ ID NO: 909 - protein, 1117 aa, Capnocytophaga ochracea
MKHILGLDLGSNSIGWAFVQQDFENKQGKIIATGSRIIPMDQGILGDFERGNTVSQTAERTTYRSMRRLRERHLLRRERLHRVLHLLGFLPPHYDAQIDFTKRYGKFIDNAEPKIAYNNGNFIFMNSFNEMVEDFKKHQPQLFYKKSNGEESRIPYDWTIYYLRKKALSQKITQQELAWLILHFNQKRGYYQLRGEEETENPNKEVAFHSLKVVDVEAEAPNKKGEIWYTIRLENGWIYRRTSKNPLDDWKGKTRDFIVTTDLNDDGTIKLDKEGKEKRSFRAPDENDWNLLKKKTEHDIDFSGKPVGTYIYDHLLQNPNQKIKGKLVRTIERKYYKDELKAILAKQIALQPELFTETLLADCIRELYRKNETQQQNLLSKDFLHLFVEDIIFYQRPLCSKKSTIANCTLEKRSYIDKETNERKDAPIKVCAKSNPYYQEFRVLQWLQNLRIYEIETDREVTAEFIETPQDYEALFNFLMSQKEIDNEGLLKYFLFAKNPQIKDKAAKSELKKWLTTYRWNYVYDAADNSSKKYPMNETGYELQRYLQKVEGLPANFLTFDITYQLWHLLYSVKDKVEFEKALKKFAKKKQLDKTSFVDSFKNFKPYPNEYGSFSEKAIKKLLPLMRFGNHWDFNRIDVSTQKRIDDLINGVANEDIRTIIREKAEKYQLNSETCFQDLPLWLAQYVVYNRHAEATDIEKWTSVSDLEAYLEDFKQHSLRNPIVEQVVTETLRVVRDIWQQYSGGQANFFDEIHIELGRELKKTAEERKQLSDKNQENENTNLRIKKLLAELKEDASIQNVRPYSLVQQELLKIYEEGVFSSTDEIEEDIQKIRKKVEPTPPEIQRYKLWLEQKYKSPYTGEVISLTKLFTEEYEIEHIIPQSRYYDDSLSNKVICESAVNKLKTNQLGLEFIQNHHGEKVRITANKEVTIFTEEQYKEFVKKHYANNSAKQQKLLLNEIPEKMVARQLNDTRYISKCISEILSKIVRSDEKDEGVNSKNIIPCTGKITTALKQDWGLNDVWNELILPRFERMNQLTQTQLFTSYNDRLQKNLPTVPIEYSQGFQKKRIDHRHHAMDALVIACATREHINYMNNQHALDKSKDKKEKQQSRIDLHPL

SEQ ID NO: 910 - protein, 303 aa, Capnocytophaga ochracea
MSFKQNLRVINKATNYYEKWEEKNGVLVKKKVKQEGTNWAIRKPLHKETVSGKIVLDRKIGKDKILTATRKAVDITFTEKIISSITDTGIQKILLNYLKYKGSPEVAFSAEGLEELNKNIAQYNDGKKHQPIYKVRIFEEGSKFPLGETGAKATKYVEAAKGTNLFFGVYQGKEKRTYATIPLNEVIERQKQGLPSVPERNEKGEPLLFSLSPNDLVYVPMEGEIAETIDFNNLSKEQKERIYKTVSFTGNQCFFVQEAVASPIVNKMEYSPLNKMERDILGIMIKEVCVKLKVDRLGNIIKA

SEQ ID NO: 911 - protein, 1471 aa, Capnocytophaga sp.
MCKYFYIKNFITFVLSKSIIPMKHILGLDLGSNSIGWAFVQQDFENKQGKIIATGSRIIPMDQGILGDFERGNTVSQTAERTTYRSTRRLRERHLLRRERLHRVLHILGFLPPHYDAQIDFTKRYGKFIDNAEPKIAYNNGNFIFMNSFNEMIEDFKKHQPQLFYKKSNGEESKIPYDWTIYYLRKKALSQKITQQELAWLILHFNQKRGYYQLRGEEETENPNKEVAFHSLKVVDVEAEAPNKKGEIWYTIRLENGWIYRRTSKIPLDDWKGKTRDFIVTTDLNDDGTIKVDKEGKEKRSFRAPDENDWNLLKKKTEHDIDFSGKTVGAYIYDHLLQNPNQKIKGKLVRTIERKYYKDELKAILAKQIALQPELFTETLLADCIRELYRKNETQQQNLLSKDFLHLFVEDIIFYQRPLRSKKSTIANCTLEKRSYIDKETNERKDAPIKVCAKSNPYYQEFRVLQWLQNLRIYEIETDREVTAEFIETPQDCEALFNFLMSQKEIDNKGLLKYFLFAKNPQIKDKAAKSELKKWLTTYRWNYVYDAADNSSKKYPMNETGYELQRYLQKVEGLPANFLTFDITYQLWHLLYSVKDKVEFEKALKKFAKKKQLDKTSFVDSFKNFKPYPNEYGSFSEKAIKKLLPLMRFGNHWDFNRIDVSTQKRIDDLINGVANEDIRTIIREKAEKYQLNSETCFQDLPLWLAQYVVYNRHAEATDIEKWTSVSDLEAYLEDFKQHSLRNPIVEQVVTETLRVVRDIWQQYGGGQANFFDEIHIELGRELKKTAEERKQLSDKNQENESTNLRIKKLLAELKEDASIQNVRPYSLVQQELLKIYEEGVFSATDEVEEDIQKIRKKAEPSKADLQRYKLWLEQKYKSPYTGEVISLTKLFTEEYEIEHIIPQSRYYDDSLSNKVICESAVNKLKTNQLGLEFIQNHHGEKVRITANKEVTIFTEEQYKEFVKKHYANNSAKQQKLLLNEIPEKMVARQLNDTRYISKYISEILSKIVRSDEKDEGVNSKNIIPCTGKITTALKQDWGLNDVWNKLILPRFERMNQLTQTQLFTSYNDRLQKNLPTVPIEYSQGFQKKRIDHRHHAMDALVIACATREHINYMNNQHALDKSKDKKEKQQSRIDLRTILCEKKNNNWQFKKPWSTFTQEAKEALEHIVVSFKQNLRVINKATNYYEKWEEKNGVLVKKKVKQEGTNWAIRKPLHKETVSGKIVLDRKIGKDKILTATRKAVDITFTEKIISSITDTGIQKILLNYLKYKGSPEVAFSTEGLEELNKNIAQYNNGKKHQPIYKVRIFEEGSKFPLGETGAKATKYVEAAKGTNLFFGVYQGKGKRTYATIPLNEVIERQKQGLPSVPERNEKGEPLLFSLSPNDLVYVPMEGEIAETIDFNNLSKEQKERIYKTVSFTGNQCFFVQEAVATPIVNKMEYSPLNKMERDILGTMIKEVCIKLKVDRLGNITKA

SEQ ID NO: 912 - protein, 1450 aa, Capnocytophaga sp.
MKHILGLDLGSNSIGWAFVQQDFENKQGKIIATGSRIIPMDQGILGDFERGNTVSQTAERTTYRNTRRLRERHLLRRERLHRVLHILGFLPPHYDSQIDFTKRYGKFIDNAEPKIAYNNGNFIFMNSFNEMIEDFKKYQPQLFYKKSNGEESKIPYDWTIYYLRKKALSQKITQQELAWLILHFNQKRGYYQLRGEEETENPNKEVAFHSLEVVDVEAEAPNKKGEIWYTIRLENGWIYRRTSKIPLDDWKGKTRDFIVTTDLNDDGTIKLDKEGKEKRSFRAPDENDWNLLKKKTEHDIDFSGKTVGAYIYDHLLQNPNQKIKGKLVRTIERKYYKDELKAILAKQIALQPELFTETLLADCIRELYRKNETQQQNLLSKDFLHLFVEDIIFYQRPLRSKKSTIANCTLEKRSYIDKETNERKDTPIKVCAKSNPYYQEFRVLQWLQNLRIYEIETDREVTAEFIETAQDNEALFNFLMSQKEIDNESLLKYFLFAKNPQIKDKVAKSELKKWLTTYRWNYVYDAADNSSKKYPMNETGYELQQYLQKVEGLPANFLTFDITYRLWHLLYSVKDKVEFEKALKKFAQEYQLDEASFVDSFKNFKPYPNEYGSFSEKAIKKLLPLMRFGNHWDFNRIDVSTQKRIDDLINGVANDEIRTIIREKAEKYQLNSETCFQGLPLWLAQYVVYNRHAEAADIEKWTSVNDLEAYLEDFKQHSLRNPIVEQVITETLRVVRDIWQRYGGGQANFFDEIHIELGRELKKTAEERKQLSNRNQENENTNLRIKKLLAELKEDASIQNVRPYSPVQQELLKIYEEGVFSATDEVEEDIQKIRKKAEPTTPEIQRYKLWLEQKYKSPYTGEVISLTKLFTEEYEIEHIIPQSRYYDDSLSNKVICESAVNKLKTNQLGLEFIQNHHGEKVRITANKEVTIFTEEQYKEFVKKHYANNSAKQQKLLLNEIPEKMVARQLNDTRYISKYISEILSKIVRSDEKDEGVNSKNIIPCTGKITTALKQDWGLNDVWNELILPRFERMNQLTQTQLFTSYNDRFQKNLPTVPIEYSQGFQKKRIDHRHHAMDALVIACATREHINYMNNQHALDKSKDKKEKQQSRIDLRTILCEKKNNNWQFKKPWSTFTQEAQEALEHIVVSFKQNLRVINKATNYYEKWEEKNGVLVKKKVKQEGTNWAIRKPLHKETVSGKIVLDRKIGKDKILTATRKSVDITFTEKIISSITDTGIQKILLNYLKYKGSPEVAFSAEGLEELNKNIAQYNDGKKHQPIYKVRIFEEGSKFPLGETGAKATKYVEAAKGTNLFFGVYQGKGKRTYATIPLNEVIERQKQGLPSVPERNEKGEPLLFSLSPNDLVYVPMEGEIAETIDFNNLSKEQKERIYKTVSFTGNQCFFVQEAVATPIVNKIEYSPLNKMERDILGTMIKEVCIKLKVDRLGNITKA

SEQ ID NO: 913 - protein, 1435 aa, Capnocytophaga sp.
MKNILGLDLGTTSIGFAHIVEDENKEKSEIKELGVRIVSLATDEQSDFEKGKSISTNANRTLKHGARLNLDRYQQRRKFLIDLLQKANLITSASILAENGKNTTHSTWQLRAKAVTERIEKEEFARVLLAINKKRGYKNSRKTKTEDEGQAIDGMAIAKCLYDENLTPGQLSLQLLQQNKKLLPDFYRSDLQKEFDLVWNLQKQFYPDILTDSFYKELQGKGKDATSKAFSKRYHFDTAENKGSKESVRLQAYQWRAEAISKQLSKEEVAYVLTEINNNLNNSSGYLGAISDRSKELYFNRQTVGQYLYAQLQENRHNSLKNKVFYRQDYLDEFERIWETQASFHKELTDELKKQIRDVVIFYQRKLKSQKGLVSFCEFESKEIEIEKDGKAITKSIGARVVPKSSPLFQEFKIWQILNNVTCKRKGIRKKKSSAKSTELDLFNEPSQSIFSLDMECKQLLFDELNLKGDLKSDKVLKLLGYSPQEWEINYNQLEGNRTQKSLYEAYLKIIEIEGYEVKDILQIKSTKDDWSLDESPLSASEIRERVKVIFQTLGICTKILYFDPLLPVKEFEQQYSYQLWHLLYSYESDDSTSGNETLYRILEKKYAFKREHATILANVALQDDYGSLSTKAIRKIYPYIKENQYSTACELAGYKHSKLSLTTEELEARELKNIIPLLKKNALRNPVVEKILNQMINVVNALIEKNSERDAEGKITKYFHFDEIRIELARELKKNAQERYEMTQNINKAKLEHQKISEKLQKQFGIKNPTKSDIIRYRLYQELEHNGYKELYTNTYIAPDVLFSKNIDIEHIVPKARVFDDSFSNKTLAFKEFNIKKGESTAFDYITSLNCEGELNQYLTRVENAYKTKSISLTKYKNLLKKASEIGDGFINRDLRDTQYIAKKAKEILFQVTKNVLSTSGSITDRLREDWGLVDVMKELNMPKYQSLGLTEVEERKDGNKVTVIKDWTKRNDHRHHAMDALTVAFTKPSYIQYLNHLNARKDENNKNYSVILAIEKKETIKVPINNGKNKRVFIEPILNFRQVAKKHLEEIFISHKAKNKVVTKNINKPAGTDKQQITLTPRGQLHKETIYGKYQYYVNKEEKVGVKFDERTITKVSNPLYREALLKRLQANDNDPKKAFAGKNALSKNPIYLDEAKTKTLPEKVNLTYLEEDFSIRKDISPDNFKDLKSIEKVIDQGVKRILIKRLQAYDNDPKKAFVDLEKNPIWLNKEKGIAIKRVTISGVSNAQPLHIGKDHLGKTTLNKEGKEVPVDYVSTGNNHHVAIYRDKEGNLQEQIVSFFEAVVRAQQGLPIIDKNYKQAEGWQFMFTMKQNEMFVFPNEATGFNPAEIDLLDPKNKKLISPNLFRVQTISIVKYGNSVVRDFKFRHHLETTLQDDKILQGITFQQIKSLEPLRNIVKVRINHLGDIVNIGEY

SEQ ID NO: 914 - protein, 1432 aa, Capnocytophaga sp.
MKNILGLDLGTTSIGFAHIVEDENKEKSEIKELGVRIVSLTTDEQSDFEKGKSITTNANRTLKHGARLNLDRYQQRRKYLIDLLHKANLITPSSILAENGKNTTHSTWQLRAKAVTERIEKEEFARILLAINKKRGYKSSRKAKTEDEGQAIDGMAIAKRLYDENLTPGQLSLQLLQQNKKLLPDFYRSDLQKEFDLVWNFQKQFYPDILTDIFYKELQGKGKDATSKAFSKRYHFDTAENKGSKESVRLQAYQWRAEAVSKQLSKEEVAYVLTEINNNLNNASGYLGAISDRSKELYFNRQTVGQYLYAQLQENRHNSLKNKVFYRQDYLDEFERIWETQALFHKELTDELKKQIRDVVIFYQRKPKSQKGLISFCEFESKEIEIEKDGKTITKNIGARVVPKSSPLFQEFKIWQILNNVICKRKGIRKKKISAKTTQLDLLNESSQTIFSLDMECKQLLFDELNLKGDLKSDKVLKLLGYSPQEWEINYNQLEGNRTQKALYEAYLKIVEMEAHDVKDILQIKSTKDDWSLDESPLSASEIRESVKAIFQALGICTKILYFDPLLPVKDFEEQDSYQLWHLLYSYESDDSTSGNETLYRILEKKYAFKREHARILANVALQDDYGSLSTKAIRKIYPNIKENQYSTACEMAGYKHSKLSLTTEELEARELKNIIPLLKKNALRNPVVEKILNQMINVVNALIEKNSERDAEGKITKYFHFDEIRIELARELKKNAQKRYEMTQNINKAKSEHQKISEILQKEFGIKNPTKSDIIRYRLYKELEHNGYKELYTNTYIAPDVLFSKNIDIEHIVPKARVFDDSFSNKTLAFKDFNIKKGESTAFDYITSLKNEEKLNQYLARVENAYKTKNISPAKYKNLLKKASEIGDGFINRDLRDTQYIAKKAKEILFQVTKNVLSTSGSITDRLREDWSLVDVMKELNMPKYQSLGLTEVEERKDGNKVTVIKDWTKRNDHRHHAMDALTVAFTKPSYIQYLNHLNARKDENNKNYSVILAIEKKETIKVPTNNGKNKRVFIEPIPNFRQVAKKHLEEIFISHKAKNKVVTKNTNKPAGTNKQQITLTPRGQLHKETIYGKYQYYVNKEEKVGVKFDKETIAKVSNPLYREALLKRLQANDNDPKKAFTGKNALSKNPIYLDEAKTKTLPEKVNLTYLEEDFSVRKKIVPKNPTSKEFVPNLKSIEKVVDEGVRNILIERLRVYNNDPEKAFVDLEKNPIWLNKEKGIAIKRVTISGVNNAQPLHIGKDHLGKTTLNKEGKEIPVDYVSTGNNHHVAIYRDKEGNLQEQIVSFFEAVVRTQQGLPIIDKTYKQEEGWQFLFTMKQNEMFVFPNEATGFNPAEIDLLDPKNKKQISPNLFRVQKIATKDYFFRHHLETNVETDNVLKNTTWKREGLSGLKDIVKVRINHLGDIVSIGEY

SEQ ID NO: 915 - protein, 1426 aa, Capnocytophaga sp.
MKNILGLDLGTTSIGFTHIVEDENKEKSEIKELGVRIVSLTTDEQSDFEKGKSISTNANRTLKHGARLNLDRYQQRRKFLIDLLQKANLITSSSILAENGKNTTHSTWQLRAKAVTERIEKEEFARVLLAINKKRGYKSSRKAKTEDEGQAIDGMAIAKRLYDENLTPGQLSLQLLQQNKKLLPDFYRSDLQKEFDLVWNFQKQFYPDILTDSFYKELQGKGKDATSKAFSKRYHFDTAENKGSRESVRLQAYQWRAEAISKQLSKEEVAYVLTEINNNLNNASGYLGAISDRSKELYFNRQTVGQYLYAQLQENKHNSLKNKVFYRQDYLDEFERIWETQASFHKELTEELKKQIRDVVIFYQRKLKSQKGLISFCEFESKEIEIEKDGKTITKSIGARVVPKSSPLFQEFKIWQILNNVTCKRKGIRKKKSSAKSTELDLFNEPSQTIFSLDMECKQLLFEELNLKGDLKSDKVLKLLGYSPQEWEINYNQLEGNRTQKALYEAYLKIVEMEAHDVKDILQIKSTKDDWALEESPLSASEIRERVKAIFQTLGICTKILYFDPLLPVKEFEEQDSYQLWHLLYSYESDDSTSGNETLYRILEKKYAFKREHATILANVTLQDDYGSLSTKAIRKIYPYIKENQYSTACEKAGYKHSKLSLTTEELEARELKNIIPLLKKNALRNPVVEKILNQMINVVNALIEKNSERDAEGKITKYFHFDEIRIELARELKKNAQERYEMTQNINKAKLEHQKISGILQKEFGIKNPTKSDITRYRLYQELAHNGYNDLYTNTYIPKELLFSKNIDIEHIVSKARVFDDSFSNKTLAFREFNIKKGESTAFDYITSLNNEEELNQYLNRVENAYKTKNISPAKYKNLLKKASEIGDGFINRDLRDTQYIAKKAKEILFQVTKNVLSTSGSITDRLREDWGLVDVMKELNMPKYQSLGLTEVEERKEGNKVTVIKNWTKRNDHRHHAMDALTVAFTKPSYIQYLNHLNARKDKNNKNYSVILAIEEKETIKVPTNNGKNKRVFIEPIPNFRQVAKKHLEEIFISHKAKNKVVTKNTNKPAGTDKQQITLTPRGQLHKETVYGKYQYYVNKEEKIGVKFDKETIAKVSNPVYREALLKRLQANDNDPKKAFAGKNALSKNPIYLDEAKTKTLTEKVNLTYLEEDFSIRKDISPDNFKDLKSIEKVIDQGVKRILIKRLQDYDNDPKKAFVDLEKNPIWLNKEKGIAIKRVTISGVNNAQPLHIGKDHLGKTTLNKEGKEIPVDYVSTGNNHHVAIYRDKEGNLQEQIVSFFEAVVGAQQGLPIVDKTYKQAEGWQFLFTMKQNEMFVFPNEATGFNPAEIDLLDPKNKKQISPNLFRVQKIATKDYFFRHHLETNVDTDNVLKNTTWKREGLSGLKDIVKVRINHLGDIVSIGEY

SEQ ID NO: 916 - protein, 1450 aa, Capnocytophaga sp.
MKRILGLDLGSNSIGWAFVEQDFENKQGKIIATGSRIIPMDQGILGDFEKGNTVSQTAERTTYRSMRRLRERHLLRRERLHRVLHILGFLPPHYDAQIDFTKRYGKFIDNAEPKIAYNNGNFIFMNSFNEMIEDFKKYQPQLFYKKSNGEESKIPYDWTIYYLRKKVLSQKITQQELAWLILHFNQKRGYYQLRGEEETENPNKEVAFHSLKVVDVEAEAPNKKGEIWYTIRLENGWIYRRTSKIPLDDWKGKTRDFIVTTDLNDDGTIKVDKEGKEKRSFRAPDENDWNLLKKKTEHDIDFSGKTVGAYIYDHLLQNPNQKIKGKLVRTIERKYYKDELKAILAKQIALQPELFTETLLADCIRELYRKNETQQQNLLSKDFLHLFVEDIIFYQRPLRSKKSTIANCTLEKRSYIDKETNERKDTFIKVCAKSNPYYQEFRVLQWLQNLRIYEIETDREVTAEFIETAEDYEALFNFLMSQKEIDNEGLLKYFLFAKNPQIKDKVAKSELKKWLTTYRWNYVYDAADNSSKKYPMNETGYDLQRYLQKVEGLPANFLTFDITYRLWHLLYSVKDKVEFEKALKKFAQEYQLDEASFVDSFKNFKPYPNEYGSFSEKAIKKLLPLMRFGNHWDFNRIDVSTQKRIDDLINGVANDEIRTIIREKAEKYQLNSESCFQGLPLWLAQYVVYNRHAEATDIEKWTSVSDLETYLEDFKQHSLRNPIVEQVVTETLRVVRDIWQQYGGGQANFFDEIHIELGRELKKTAEERKQLSNRNQENENTNLRIKKLLAELKEDASIQNVRPYSPVQQELLKIYEEGVFSSTDQVEEDIQKIRKKAEPTTPEIQRYKLWLEQKYKSPYTGEVISLTKLFTEEYEIEHIIPQSRYYDDSLSNKVICESAVNKLKTNQLGLEFIQNHHGEKVRITGNKEVTIFTEEQYKEFVKKHYANNSAKQQKLLLNEIPEKMVARQLNDTRYISKYISEILSKIVRSDEKDEGVNSKNVIPCTGKITTALKQDWGLNDVWNELILPRFERMNQLTQTQLFTSYNDRFQKNLPTVPIEYSQGFQKKRIDHRHHAMDALVIACATREHINYMNNQHALDKNKDKKEKQQSRIDLRTILCEKKNNNWQFKKPWSTFTQETKEALEHIVVSFKQNLRVINKATNYYEKWEEKNGVLVKKKVKQEGTNWAIRKPLHKETVSGKIVLDRKIGKDKILTATRKEVDITFTEKIISSITDTGIQKILLNYLNYKGSPEVAFSAEGLEELNKNIAQYNDGKKHQPIYKVRIFEEGSKFPLGETGAKATKFVEAAKGTNLFFGVYQGKEKRSYATIPLNEVIERQKQGLPSVPERNEKGEPLLFSLSPNDLVYVPMEGEIAETIDFNNLSKEQKERIYKTVSFTGNQCFFVQEAVATPIVNKMEYSPLNKMERDILGTMIKEVCIKLKVDRLGNITKA

SEQ ID NO: 917 - protein, 1437 aa, Capnocytophaga sp.
MKYIKYILGLDIGSNSIGWALIQLDLLQKTKRIIATGSRIIPMDQKVLSDFGKGITISPTAQRTSYRNARHCRERHLLRRERLHRVLHILGFLPTHYDKQIDFSKRYGKFVDNTEPKIAYNERKFLFMDSFQEMLADFKIHQPDLFYTKKNGEESKIPYDWTIYYLRKKALSRKISKEELAWIILNFNQKRGYYQLREEEEENKENDFEIISSKIISVIKKDKDKKYNKYWYDIILENGLVYQAAFYNDFVYNWINQDREFIIERISLKNGTEKVKLSYLPTFDEIDKMDKKEQDKYYKKIKIKTENSIGNKTVGCYIYDHILQNPNEKIKGKLVRTIERKYYKEELKAILEKQVALQPELFTDQLFADCIRELYSKNEAQQRNLAARDFVHLFVEDIIFYQRSLRRQKSTLANCSLESRSYIDKDSHTRKEAPLKVCPKSNPYYQEFRVLQWLQNLKIYEIDTDQEVTHEFIKTLEDKQQFFDFLMNQKEIDCEELLKYFLNQTYPNAREKALKSELKKWKDTYRWNYVYDIGEKSSKKYPMNETRYELKRHLEKVANLPDDFLSSEVEYLLWHLIYSVKDKVAYEKGLKTFAQKHHLDKDSFVESFKKFKPYPSEYGSFSEKAIRKLLPLMRFGSYWDFNHIDKNTQKRIEDLITGVENEEIRTILREKAEKYQLEKETDFQDLPLWLAQYIVYNRHAEASSLEKWTSVNDLETYLNEFKQYSLRNPIVEQVVMETLRVVRDIWQQYGQGQASFFDEIHIELGRELKKTAKEREKLSKQNQKNEDINLSIKEKLKELEKYNTRAYSITHQEKYKLWLEQKHISPYTGQIISPENLFTDNYEIEHIIPQSRFFDDSLSNKVVCESIVNKAPYKDRQLGLEFIKNQGGRIVKELSTENKTIKIFTEEQYRTFIKEHYSNNPEKTKKLLLEEIPEKMVARQMNDTCYISKFISEILSKIVRSDEQDEGVHSKNVILCTGKITSALKQDWGVNDVWNDLILPRFERMNDLTQSTLFTTYNEKYQKYLPTVPMEYSNGFQKKRIDHRHHAMDAIIIACATREHINYINNQHALEKGKDKKEKQKEHDKLREKLCIKKDNKGSEENYSWIFKKPWDTFTQEVQAALEGIVVSFKQNLRVINKATNYYERWVEENGKYIKKMVKQEGTNWAIRKPLHEETISGKIYLDREEITKNDILTATRKTVDSSFDEKRIKKITDTGIQKILLNYLKYKGSPEIAFSPEGLEELNKNLSIYNDGKPHKPIYKVRIYEKGSGRFALGEKGRKYKKYVQGAPNLYFGIYQGANKRSFATIPLNEVIERQKQGRPSIPEYNEKGDPLLFSLSPNDLVYVPVEGEIIEDIDFQNLSKEQKERIYNVNDFSSTCYFTPNRIAKAIFPKEVDLQRKGDKLPGSYDTKTASLEGIQIKEVCIKLKIDRLGNISKA

SEQ ID NO: 918 - protein, 1140 aa, Catellicoccus marimammalium
MKNMTKVNVGLDVGISSAGWSVINAETNQILESGVRLFSGSDADENVNRRNQRQGRRLFRRRKLRIQEAKKYLENVFQLKDIEPKDEWNPYEIRVRALNEKVSKEELSIALLNIVKHRGISYELEDVTDEEGTNTQSFQSGLDYNRRLLKTKTVGEIQYDRLQKYGQVRGQIQTEDGLLINIFPTKNYVEEVERILETQKKYHPEIDDVFIEKIISFVTRKREYFVGPGNEKSRTDYGIYRENGETLDNLFEILIGKDKFYPEEYRAAGSSYTAQIFNLLNDLNNLRIPTTEDHHLTKAQKEEIITELKNTSRLSGGMLKLISKVTKAPKEEISGYRKDEKDKPDLHSLAYYRKQKNMLEKEGIQIADFSEELLDELATMMTLNTEPGEIRKQLNKITNQYDILTPEVIEVLVKNHTAFVATSNHKWHRFSLKLMKEFIPELLETSKEQSTILCERGFIQNRASYLDENHHFNYAELRENLYNPVVRKSTCEMLKVFTAIQEKYPNIQNVIVELPRETNEDEQKRKIKKINDNNAKRKKEILKEAQAQSGLSEEALEEKLLKTKGLYLKLMLWYEQEGKCVYSGQEIPLSDLLQNKGGYEVDHIIPISISFDDRLCNKVLVRQQLNSQKSNQTPFEYMTTHTDGHLSFHELKELVGKNKRFSKEKRELLLAEIYSNDIETRKRFINRNLVDTSYTARIVLNALQQYKKENQLSMNVSVVRGAMTNILRKKVKLDKTRETFHHHAIDASLMAVIPNIEFFKERKEWLPKSANEEVVEVEVSEEETMPEKEFKVKMRLPESFIQDVQILQRNSFAKEEVSGPQTRERNLKIKFSHQVDQKMNRKVADDTIYGTRQAQLGKDKKEETYVIGKIKDIYNYDEYVRFKKRYDKNKESFLMYHHDPQTFEKLEEILAQYPEYIEDEKGKKKKVSPFALYREENGPVTKYAKKNNGPVIKQLKYYDSKLNRKIDISHKYSTKNRQVVLQSLKPYRTDVYRNQDTGEYTLVGIDQNDGKFVNGHYGIPKSRYEEIKANNKLSEHDEFVFSLYKNSMVKVIDENGESIVVRYLSRSMPNRKNNAEIKPVEKYQFEDGEVVPVYGKCRKQMQTVFVKKGWTLLKGNTDILGNTYFVEKESENPKKMIDDK

SEQ ID NO: 919 - protein, 1419 aa, Chryseobacterium sp.
MMIKNILGLDLGTNSIGWALIKQNFENKYGEILGMGSRIIPMSQDVLGEFGKGNSVSQTAARTGYRGVRRLRERFLLRRERLHRVLNVLNFLPEHYASQIDFEKRFGKFKYETEPKLAYNNDGFFFKNSFDEMLGDFKDHQFHLLENGRKVPYDWTIYYLRKKALSQKIEKEELAWILLNFNQKRGYYQLRGEDFEEEKDRVFVRLKVDRVVDSGENIKGKILYDVYFENGWKYEKQIVKTEDWIGRTKEFIVTESILKNGDTKRTFKAVDSEKDWIAIKTKTEQEIDKSHKTVGAYIYEALLQNPKQKIKGKLVRTIERKFYREELKKILERQKEFHPELQSDDLYNDCIRELYRNNEAHQITLSKKDFVHLLLNDLIFYQRPLRSQKSSVSNCTLEFRKYKDENGVEHAQYLKTIPKSNPYYQEFRVWQWMFNLNIYRKDDDTNVTKEFLSSTEDYETLFEFLNNRKEVDQKALLRHFKLNEKTHRWNYVEDKKYPCNETKTMISTRLEKVENYPSDFLTREMEQNIWHIIYSVNDKIEYEKALKSFAHKNNLDENSFFEAFKKFPPFKSEYGSFSEKAIKKLLPLLRLGKYWNWESIDRKSQGRIEKIITGEFDGNIKDKVREKAIHLTAENDFQGLQLWLAQYIVYGRHSEASMIGKWNSADDLEEFLKGFKQHSLRNPIVEQVITETLRVVKDIWLKYGNGAKDFFSEIHIELGREMKQTKDERVDATKRITENENTNLRIKALLAEMMNDNSVENIRPYSPMQQEILKIYEDGILKSDIEIDDDILKISKTAQPSSSDLKRYKLWLEQRYKSPYTGQIIPLNKLFTSEYEIEHIIPQSRYFDDSFSNKIICESAVNKLKDNYIGLGFIKQFGGMIVECGFGKSVEIFKAEEYEDFVKKHYANNRSKRNKLLLEEIPEKMIDRQLNDTRHISKYISGVLSNIVRQEDGTDEGVNSKNIVPGNGKITTQLKQDWGLNDVWNELILPRFERMNQLTNSTDFTSWNKNHQKFLPTVPIEFSKGFSKKRIDHRHHAMDALVIACATKDHINLLNNQSAKSDTKRYDLKRKLMKFERVVYSHSKTGEKIEKEVPKQFLKPWDNFTVDAKNKMETIIVSFKQNLRVINKATNHYEKWIEKDGIKRKELIKQEGTNWAIRKPMHKETVSGKVDLPGIKIPKGKILTATRKSLDTSFDLKTINSITDTGIQKILKNYLEFKGSSELAFSPEGIEDMNKNIEKFNDGKPHQSINKVRIFELGSKFSVGQTGNKKDKYVEAAKGTNLFFAVYEDKNGKRSYETIPLNEVIERQKQGLDSVSFKNKEDFLLCPNDLVYVPSEDELENIYNIDFKNLTTEKTGNIYKVVSFSGNQIFFIRQDIAISIVNKAEFSTLNKMERAIDGSMIKENCIKLKIDRLGNIAKI

SEQ ID NO: 920 - protein, 1065 aa, Clostridium perfringens
MNKDINYALGLDIGITSVGWAVINLDLNRIEDLGVRIFNAAENPKDGSSLALPRRLARGRRRLLRRKAYRVERVRKLIVKNNILTKEELEGLFKNKEVIDVWEARVKGLDYKLSREEWAKILINFCKRRGFKSNRKNETKDKEAGQILSSISYNIEKMKETNSRTIGEYIYNEVKNSDDSYAPLRNKFGEYKMCVSRDVLREEIHTLFEKQRELGNNFASDEIEDKYFEIFNSQRPFSNFEDLEKLVGFCTFERKKHKRAPKHCISSEEFTLYEGINKLSIIKDGEKRKLSEEERTLVVNEAFNKKEIKYTTLRKLLGLSEDELFSTLTYSIDKDISKTENTKFVSLKGYHEIKRAIEKGVSKKAWQDIENNRNLLNDIAYVLTLGKTDDEIEKQLRLRNVPEELFESLLDMSFSKFNNLSIYALEKILPFMKEGYQYNEACEKAGYNFKAIYEGVRTKKLPVIEIDEIVNPVVNRALAQTRKVINSVIDKYGSPVRINIELARDLAKNFKDRKLIEKEQKENRANLDKIRENLRELMDKEPTAVEVLKYRLWEQQRGECAYTQSQIALERLFSPGYCEIDHIIPFSRSFDDSLSNKILVLGSENQRKGNKIPYEYFGEDSERWNSFEIWVKGSYLNYKKKANLLKKKFTEEEQRDWKARNLQDTKYICRYISNFVNNRLEFKESENKQKVITVNGRATAYLRSRWGLNKVREDGDKHHALDAAVVGVTTQGMVQKISKYSKAHELYTVRKNDEFVDVETGECVDVDEYKEIRKDILPRPWRGFSEELKLRLSDNPLEELKKLPIETYNEEFIKENVKPIFVSRVPFRKISGKLFKETIYSERAFKDGYFVSKKSLVDLKRGDLDNFYNYECDKKLYDAISERMKEFNYNGKKAFESPFRKPTKSGKEGPVVRSVKIKSAAPFKDGIPMNEGLVAKEGMVRIDIYEKEGKYFVVPVYRYQLAKGIVPKRAAIAGKSELKWPIMDQTYNFKFSIFKNDLIEIKYAKKDGYFGYYDGFDRHTASLVIENHDNSDRYRGIGVKTGVVEFNKYEVDVLGNYHKVNLGGN

SEQ ID NO: 921 - protein, 1099 aa, Corynebacterium accolens
MSLSYRVGIDVGTYSLGCTAIEVDDNDQPVNILSSVSLIHDSGLDPDQQKRAVTRLASSGVARRTRRLYRRRRRRMINLEKFLTSQGWETRPFEHYSDPYLPWNARVALVNGYISDDAQRGMYLSIAFRHIANHRGWRNPYWKVSSLYSPDKPSDAFEQIRKELEESTGHKIPETVTVGQLISFAQFGKDRLRGGGKKKDEKKPQEQVNQAVISARLHQIDHAREINEICRVQKIDDALRKQILDLVFAAESPKGAQIGRVGKDPLQPKLPRALKASDAFQQYRIVALAGNLRIYRDGVSTPLDRDEKLIVFNYLINLSHKEEPSWLKVAEVLNIDRGQLHGTATMTDDGERAGAAPPVHDTNRTILGCKIKPLVHWWEGANDDERAAMLKALSNSEVEDFDSPAGAQTQAFFANLDESEQEKLDSLHLPIGRAAYSEDTLMRLTSRMLDENLDLYEARLAEFDIPKDWAPPAPRIGEPVGNPAVDRVLKGVARWLEAAADEWGAPKSVVIEHVRDGFISKSKANEIDRANNARHKRNRELFKQMQENLGIDGKLRSSDLWRYQSVQRQNCQCAYCGSPITYTTCEMDHIVPRAGEGSTNTRDNLVATCHRCNLAKKNIPFAVWAAQTNIPGVSVKEALDRTRHWSEDSGMTSKDFKKFRKNVCDRLKRTVVDEPLDARSMESVAWMANELRGRVAQRFQEENTVVNVYRGELTAEARRAAGISDKLRFIDGTGKSRLDRRHHAVDAAVVAFTQNYVAETLAIRSNKKREAQLLQAAEQWKEFTGSDAEHRAAWNAWLPKMQKLAVLLQKALDEDRIAVTSNLRLRLGNGRAHEDSIGELKTIRVGDAISVTDIDRASSEALWCALTREPDFDENNGLPENPDRRIRIHGTWYDAEDDIEVFPVGAGAIKVRGGYAELSRFHHARIYKIPGKKAPVYCMLRVYNADLIRHRHEDLFSVEIKPQTMSVRQAEPKLRKALAENTAEYLGWLVTDDELVIDTSNFNTGQIAEMQSELGQVRRWRLDGFYSPSTLRLRPLQMSAEGLREDTSIGAKKIIDRPGWLPAINKLFGEGHVTVVRRDALGRARLTSNAHLPISWKAE

SEQ ID NO: 922 - protein, 1084 aa, Corynebacterium diphtheriae
MKYHVGIDVGTFSVGLAAIEVDDAGMPIKTLSLVSHIHDSGLDPDEIKSAVTRLASSGIARRTRRLYRRKRRRLQQLDKFIQRQGWPVIELEDYSDPLYPWKVRAELAASYIADEKERGEKLSVALRHIARHRGWRNPYAKVSSLYLPDGPSDAFKAIREEIKRASGQPVPETATVGQMVTLCELGTLKLRGEGGVLSARLQQSDHAREIQEICRMQEIGQELYRKIIDVVFAAESPKGSASSRVGKDPLQPGKNRALKASDAFQRYRIAALIGNLRVWVDGEKRILSVEEKNLVFDHLVNLTPKKEPEWVTIAEILGIDRGQLIGTATMTDDGERAGARPPTHDTNRSIVNSRIAPLVDWWKTASALEQHAMVKALSNAEVDDFDSPERAKVQAFFADLDDDVHAKLDSLHLPVGRAAYSEDTLVRLTRRMLSDGVDLYTARLQEFGIEPSWTPPTPRIGEPVGNPAVDRVLKTVSRWLESATKTWGAPERVIIEHVREGFVTEKRAREMDGDMRRRAARNAKLFQEMQEKLNVQGKPSRADLWRYQSVQRQNCQCAYCGSPITFSNSEMDHIVPRAGQGSTNTRENLVAVCHRCNQSKGNTPFAIWAKNTSIEGVSVKEAVERTRHWVTDTGMRSTDFKKFTKAVVERFQRATMDEEIDARSMESVAWMANELRSRVAQHFASHGTTVRVYRGSLTAEARRASGISGKLEFLDGVGKSRLDRRHHAIDAAVIAFTSDYVAETLAVRSNLKQSQAHRQEAPQWREFTGKDAEHRATWRVWCQKMEKLSALLTEDLRDDRVVVMSNVRLRLGNGSAHEETIGKLSKVKLGSQLSVSDIDKASSEALWCALTREPDFDPKDGLPANPERHIRVNGTHVYAGDNIGLFPVSAGSIALRGGYAELGSSFHHARVYKITSGKKPAFAMLRVYTIDLLPYRNQDLFSVELKPQTMSMRQAEKKLRDALATGNAEYLGWLVVDDELVVDTSKIATDQVKAVEAELGTIRRWRVDGFFGDTRLRLRPLQMSKEGIKKESAPELSKIIDRPGWLPAVNKLFSEGNVTVVRRDSLGRVRLESTAHLPVTWKVQ

SEQ ID NO: 923 - protein, 1084 aa, Corynebacterium diphtheriae
MKYHVGIDVGTFSVGLAAIEVDDAGMPIKTLSLVSHIHDSGLDPDEIKSAVTRLASSGIARRTRRLYRRKRRRLQQLDKFIQRQGWPVIELEDYSDPLYPWKVRAELAASYIADEKERGEKLSVALRHIARHRGWRNPYAKVSSLYLPDGPSDAFKAIREEIKRASGQPVPETATVGQMVTLCELGTLKLRGEGGVLSARLQQSDHAREIQEICRMQEIGQELYRKIIDVVFAAESPKGSASSRVGKDPLQPGKNRALKASDAFQRYRIAALIGNLRVRVDGEKRILSVEEKNLVFDHLVNLAPKKEPEWVTIAEILGIDRGQLIGTATMTDDGERAGARPPTHDTNRSIVNSRIAPLVDWWKTASALEQHAMVKALSNAEVDDFDSPEGAKVQAFFADLDDDVHAKLDSLHLPVGRAAYSEDTLVRLTRRMLADGVDLYTARLQEFGIEPSWTPPAPRIGEPVGNPAVDRVLKTVSRWLESATKTWGAPERVIIEHVREGFVTEKRAREMDGDMQRRAARNAKLFQEMQEKLNVQGKPSRADLWRYQSVQRQNCQCAYCGSPITFSNSEMDHIVPRAGQGSTNTRENLVAVCHRCNQSKGNTPFAIWAKNTSIEGVSVKEAVERTRHWVTDTGMRSPDFKKFTKAVVERFQRATMDEEIDARSMESVAWMANELRSRVAQHFASHGTTVRVYRGSLTAEARRASGISGKLKFFDGVGKSRLDRRHHAIDAAVIAFTSDYVAETLAVRSNLKQSQAHRQEAPQWREFTGKDAEHRAAWRVWCQKMEKLSALLTEDLRDDRVVVMSNVRLRLGNGSAHKETIGKLSKVKLGSQLSVSDIDKASSEALWCALTREPDFDPKEGLPANPERHIRVNGTHVYAGDNIGLFPVSAGSIALRGGYAELGSSFHHARVYKITSGKKPAFAMLRVYTIDLLPYRNQDLFSVELKPQTMSMRQAEKKLRDALATGNAEYLGWLVVDDELVVDTSKIATDQVKAVEAELGTIRRWRVDGFFSPSKLRLRPLQMSKEGIKKESAPELSKIIDRPGWLPAVNKLFSDGNVTVVRRDSLGRVRLESTAHLPVTWKVQ

SEQ ID NO: 924 - protein, 1084 aa, Corynebacterium diphtheriae
MKYHVGIDVGTFSVGLAAIEVDDAGMPIKTLSLVSHIHDSGLDPDKIKSAVTRLASSGIARRTRRLYRRKRRRLQQLDKFIQRQGWPVIELEDYSDPLYPWKVRAELAASYIADEKERGEKLSVALRHIARHRGWRNPYAKVSSLYLPDEPSDAFKAIREEIKRASGQPVPETATVGQMVTLCELGTLKLRGEGGVLSARLQQSDHAREIQEICRMQEIGQELYRKIIDVVFAAESPKGSASSRVGKDPLQPGKNRALKASDAFQRYRIAALIGNLRVRVDGEKRILSVEEKNLVFDHLVNLAPKKEPEWVTIAEILGIDRGQLIGTATMTDDGERAGARPPTHDTNRSIVNSRIAPLVDWWKTASALEQHAMVKALSNAEVDDFDSPEGAKVQAFFADLDDDVHAKLDSLHLPVGRAAYSEDTLVRLTRRMLADGVDLYTARLQEFGIEPSWTPPAPRIGEPVGNPAVDRVLKTVSRWLKSATKTWGAPERVIIEHVREGFVTEKRAREMDGDMRRRAARNAKLFQEMQEKLNVQGKPSRADLWRYQSVQRQNCQCAYCGSPITFSNSEMDHIVPRAGQGSTNTRENLVAVCHRCNQSKGNTPFAIWAKNTSIEGVSVKEAVERTRHWVTDTGMRSTDFKKFTKAVVERFQRATMDEEIDARSMESVAWMANELRSRVAQHFASHGTTVRVYRGSLTAEARRASGISGKLEFLDGVGKSRLDRRHHAIDAAVIAFTSDYVAETLAVRSNLKQSQAHRQEAPQWREFTGKDAEHRAAWRVWCQKMEKLSALLTEDLRDDRVVVMSNVRLRLGNGSAHEETIGKLSKVKLGSQLSVSDIDKASSEALWCALTREPDFDPKDGLPANPERHIRVNGTHVYAGDNIGLFPVSAGSIALRGGYAELGSSFHHARVYKITSGKKPAFAMLRVYTIDLLPYRNQDLFSVELKPQTMSMRQAEKKLRDALATGNAEYLGWLVVDDELVVDTSKIATDQVKAVEAELGTIRRWRVDGFFGDTRLRLRPLQMSKEGIKKESAPELSKIIDRPGWLPAVNKLFSEGNVTVVRRDSLGRVRLESTAHLPVTWKVQ

SEQ ID NO: 925 - protein, 1084 aa, Corynebacterium diphtheriae
MKYHVGIDVGTFSVGLAAIEVDDAGMPIKTLSLVSHIHDSGLDPDKIKSAVTRLASSGIARRTRRLYRRKRRRLQQLDKFIQRQGWPVIELEDYSDPLYPWKVRAELAASYIADEKERGEKLSVALRHIARHRGWRNPYAKVSSLYLPDEPSDAFKAIREEIKRASGQPVPETATVGQMVTLCELGTLKLRGEGGVLSARLQQSDHAREIQEICRMQEIGQELYRKIIDVVFAAESPKGSASSRVGKDPLQPGKNRALKASDAFQRYRIAALIGNLRVRVDGEKRILSVEEKNLVFDHLVNLAPKKEPEWVTIAEILGIDRGQLIGTATMTDDGERAGARPPTHDTNRSIVNSRIAPLVDWWKTASALEQHAMVKALSNAEVDDFDSPEGAKVQAFFADLDDDVHAKLDSLHLPVGRAAYSEDTLVRLTRRMLADGVDLYTARLQEFGIEPSWTPPAPRIGEPVGNPAVDRVLKTVSRWLESATKTWGAPERVIIEHVREGFVTEKRAREMDGDMRRRAARNAKLFQEMQEKLNVQGKPSRADLWRYQSVQRQNCQCAYCGSPITFSNSEMDHIVPRAGQGSTNTRENLVAVCHRCNQSKGNTPFAIWAKNTSIEGVSVKEAVERTRHWVTDTGMRSTDFKKFTKAVVERFQRATMDEEIDARSMESVAWMANELRSRVAQHFASHGTTVRVYRGSLTAEARRASGISGKLEFLDGVGKSRLDRRHHAIDAAVIAFTSDYVAETLAVRSNLKQSQAHRQEAPQWREFTGKDAEHRAAWRVWCQKMEKLSALLTEDLRDDRVVVMSNVRLRLGNGSAHEETIGKLSKVKLGSQLSVSDIDKASSEALWCALTREPDFDPKDGLPANPERHIRVNGTHVYAGDNIGLFPVSAGSIALRGGYAELGSSFHHARVYKITSGKKPAFAMLRVYTIDLLPYRNQDLFSVELKPQTMSMRQAEKKLRDALATGNAEYLGWLVVDDELVVDTSKIATDQVKAVEAELGTIRRWRVDGFFGDTRLRLRPLQMSKEGIKKESAPELSKIIDRPGWLPAVNKLFSEGNVTVVRRDSLGRVRLESTAHLPVTWKVQ

SEQ ID NO: 926 - protein, 1084 aa, Corynebacterium diphtheriae
MKYHVGIDVGTFSVGLAAIEVDDAGMPIKTLSLVSHIHDSGLDPDKMKSAVTRLASSGIARRTRRLYRRKRRRLQQLDKFIQRQGWPVIELEDYSDPLYPWKVRAELAASYIADEKERGEKLSVALRHIARHRGWRNPYAKVSSLYLPDEPSDAFKSIREEIKRASGQPVPETATVGQMVTLCELGTLKLRGEGGVLSARLQQSDHAREIQEICRMQEIGQELYRKIIDVVFAAESPKGSASSRVGKDPLQPGKNRALKASDSFQRYRIAALISNLRVRVDGEKRILSVEEKNLVFDHLVNLAPKKEPEWVTIAEILGIDRGQLIGTATMTDDGERAGARPPTHDTNRSIVNSRIAPLVDWWKTASALEQHAMVKALSNAEVDDFDSPEGAKVQAFFADLDDDVHAKLDSLHLPVGRAAYSEDTLVRLTRRMLADGVDLYTARLQEFGIEPSWTPPAPRIGEPVGNPAVDRVLKTVSRWLESATKTWGAPERVIIEHVRDGFVTEKRAREMDGDMRRRAARNAKLFQEMQEKLNVQGKPSRADLWRYQSVQRQNCQCAYCGSPITFSNSEMDHIVPRAGQGSTNTRENLVAVCHRCNQSKGNTPFAIWAKNTSIEGVSVKEAVERTRHWVTDTGMRSTDFKKFTKAVVERFQRATMDEEIDARSMESVAWMANELRSRVAQHFASHGTTVRVYRGSLTAEARRASGISGKLEFLDGVGKSRLDRRHHAIDAAVIAFTSDYVAETLAVRSNLKQSQAHRQEAPQWREFTGKDAEHRAAWRVWCQKMEKLSALLTEDLRDDRVVVMSNVRLRLGNGSAHEETIGKLSKVKLGSQLSVSDIDKASSEALWCALTREPDFDPKDGLPANPERHIRVNGTHVYAGDNIGLFPVSAGSIALRGGYAELGSSFHHARVYKITSGKKPAFAMLRVYTIDLLPYRNQDLFSVELKPQTMSMRQAEKKLRDALATGNAEYLGWLVVDDELVVDTSKIATDQVKAVEAELGTIRRWRVDGFFGDTRLRLRPLQMSKEGIKKELAPELSKIIDRPGWLPAVNKLFSEGNVTVVRRDSLGRVRLESTAHLPVTWKVQ

SEQ ID NO: 927 - protein, 1084 aa, Corynebacterium diphtheriae
MKYHVGIDVGTFSVGLAAIEVDDAGMPIKTLSLVSHIHDSGLDPDKMKSAVTRLASSGIARRTRRLYRRKRRRLQQLDKFIQRQGWPVIELEDYSDPLYPWKVRAELAASYIADEKERGEKLSVALRHIARHRGWRNPYAKVSSLYLPDEPSDAFKSIREEIKRASGQPVPETATVGQMVTLCELGTLKLRGEGGVLSARLQQSDHAREIQEICRMQEIGQELYRKIIDVVFAAESPKGSASSRVGKDPLQPGKNRALKASDAFQRYRIAALIGNLRVRVDGEKRILSVEEKNLVFDHLVNLAPKKEPEWVTIAEILGIDRGQLIGTATMTDDGERAGARPPTHDTNRSIVNSRIAPLVDWWKTASALEQHAMVKALSNAEVDDFDSPEGAKVQAFFADLDDDVHAKLDSLHLPVGRAAYSEDTLVRLTRRMLADGVDLYTARLQEFGIEPSWTPPAPRIGEPVGNPAVDRVLKTVSRWLESATKTWGAPERVIIEHVREGFVTEKRAREMDGDMRRRAARNAKLFQEMQEKLNVQGKPSRADLWRYQSVQRQNCQCAYCGSPITFSNSEMDHIVPRAGQGSTNTRENLVAVCHRCNQSKGNTPFAIWAKNTSIEGVSVKEAVERTRHWVTDTGMRSTDFKKFTKAVVERFQRATMDEEIDARSMESVAWMANELRSRVAQHFASHGTTVRVYRGSLTAEARRASGISGKLEFLDGVGKSRLDRRHHAIDAAVIAFTSDYVAETLAVRSNLKQSQAHRQEAPQWREFTGKDAEHRAAWRVWCQKMEKLSALLTEDLRDDRVVVMSNVRLRLGNGSAHEETIGKLSKVKLGSQLSVSDIDKASSEALWCALTREPDFDPKDGLPANPERHIRVNGTHVYAGDNIGLFPVSAGSIALRGGYAELGSSFHHARVYKITSGKKPAFAMLRVYTIDLLPYRNQDLFSVELKPQTMSMRQAEKKLRDALATGNAEYLGWLVVDDELVVDTSKIATDQVKAVEAELGTIRRWRVDGFFGDTRLRLRPLQMSKEGIKKESAPELSKIIDRPGWLPAVNKLFSEGNVTVVRRDSLGRVRLESTAHLPVTWKVQ

SEQ ID NO: 928 - protein, 1084 aa, Corynebacterium diphtheriae
MKYHVGIDVGTFSVGLAAIEVDDAGMPIKTLSLVSHIHDSRLDPDKIKSAVTRLASSGIARRTRRLYRRKRRRLQQLDKFIQRQGWPVIELEDYSDPLYPWKVRAELAASYIADEKERGEKLSVALRHIARHRGWRNPYAKVSSLYLPDEPSDAFKAIREEIKRASGQPVPETATVGQMVTLCELGTLKLRGEGGVLSARLQQSDHAREIQEICRMQEIGQELYRKIIDVVFAAESPKGSASSRVGKDPLQPGKNRALKASDAFQRYRIAALIGNLRVRVDGEKRILSVEEKNLVFDHLVNLAPKKEPEWVTIAEILGIDRGQLIGTATMTDDGERAGARPPTHDTNRSIVNSRIAPLVDWWKTASALEQHAMVKALSNAEVDDFDSPEGAKVQAFFADLDDDVHAKLDSLHLPVGRAAYSEDTLVRLTRRMLADGVDLYTARLQEFGIEPSWTPPAPRIGEPVGNPAVDRVLKTVSRWLESATKTWGAPERVIIEHVREGFVTEKRAREMDGDMRRRAARNAKLFQEMQEKLNIQGKPSRADLWRYQSVQRQNCQCAYCGSPITFSNSEMDHIVPRAGQGSTNTRENLVAVCHRCNQSKGNTPFAIWAKNTSIEGVSVKEAVERTRHWVTDTGMRSTDFKKFTKAVVERFQRVTMDEEIDARSMESVAWMANELRSRVAQHFASRGTTVRVYRGSLTAEARRASGISGKLEFLDGVGKSRLDRRHHAIDAAVIAFTSDYVAETLAVRSNLKQSQAHRQEAPQWREFTGKDAEHRAAWRVWCQKMEKLSALLTEDLRDDRVVVMSNVRLRLGNGSAHEETIGKLSKVKLGSQLSVSDIDKASSEALWCALTREPDFDPKDGLPANPERHIRVNGTHVYAGDNIGLFPVSAGSIALRGGYAELGSSFHHARVYKITSGKKPAFAMLRVYTIDLLPYRNQDLFSVELKPQTMSMRQAEKKLRDALATGNAEYLGWLVVDDELVVDTSKIATDQVKAVEAELGTIRRWRVDGFFGDTRLRLRPLQMSKEGIKKESAPELSKIIDRPGWLPAVNKLFSEGNVTVVRRDSLGRVRLESTAHLPVTWKVQ

SEQ ID NO: 929 - protein, 1069 aa, Corynebacterium matruchotii
MAAIAIDDDGKPTEILSAISLIHDSGVDPDSAKSAATRLATSGIARRTRRLYRRKRKRLAKLDKFISSQGWPLKEFEKYEDPFYPWRVRAELATTAITDQQELGEKLSIALRHIARHRGWRNPYSKVTALYTVTEPSDAFLAMQEECAKQLGRTIPETITVGQLVTGMNLGKTRLRGENSLLAARPRQSDNANEIHTIAKVQGLSNELVRQIIDHVFAAESPKGSAAEQVGKDPLQPTKKRALKASDAFQQYRIAALIGNLRIRGGKGNRRLTTEETRLVFDYLRSLPAKQEPTWQLVAEQLKIDRGNLVGTAIMTDDGERAGAKPPVHDTNRIMENTKIKPLATWWKSADADARAAMVKALSNAEVDDFDSQAGAQVQEFFFGISDEDQEKLDGLHLPIGRAAYSEDTLDRLTKRMIGEGMDLYEARQAEFKISNDWAPPAPEIGERVGNPAVDRVLKATARWLNAAERQWGAPKSVNIEHVRAAFMSESSARELDRDNQQRAKRNVKVVAEMQEKLGIEGRPSRADVWRFQSIQRQNGKCAYCGAEISFKNSEMDHIIPQVGEGSTNTRDNLVAVCRECNSSKSNIAFAVWAENTSRPGVSVQKAIERTHHWVTDSGLRKPEFDKFRKQVCDRLRRKATDEPIDARSLESVAWMANELRSRIAQKFKDGDTKVRVYKGALTAEARRASGISGKLEFVDGKGKSRLDRRHHAVDAAVVAFTSNYVAETLALRSNMKFDQELRRKAPQWREFTGSDHVHQVEWTKWKYRMQALAELLNNALVQDRIVVMHNLRLRLGNGAAHEDTIGKLTRLKVGDAISTTDIDRASSEALWCALTRDPDYDPKTGLPENPNRTIRIHGTHLTASDEITVFPVAAASIPIRDGFAKLGSNYHHVRLFRVPSGKKYKYCLMQVYTVDLLKFRKEDLFTVELKPQTISVRTCEALLRKALANGTAEYLGWLVSDDELLIDTSSFDTPGIVKLREEYGPVNRWRLAGLTSVTRLNLRPLYLSKEGLKPNVNPEIKKIIDNRSWIITVNKLFSSGHVKIIRRDALGRPRLHSAAHLPICWEVK

SEQ ID NO: 930 - protein, 210 aa, Diplosphaera colitermitum
MSDILDKPIVLSLNRAWQVIGHRTVKQALVALNGGNADLPPALGLDIAYPKFDDGAWNFDRPLFLNPLPWSEWIELPVRDFDFAITTPRLRIRVPTVIVATQFAKMPVRIPRLTREAIFERDGGVCQYTGEHVGKHGGNLDHVVPRDRGGRDSFENLVWAKREINSLKANRLPHEAGLRLLRRPKAPAPLPASMTIREARHPDWRHFLTP

SEQ ID NO: 931 - protein, 1332 aa, Dolosigranulum pigrum
MQKNYTIGLDIGTNSVGWAVMKDDYTLIRKRMKVLGNTDIKKIKKNFWGVRLFDEGETAKETRLKRGTRRRYQRRRNRLIYLQDIFQQPMLAIDENFFHRLDDSFFVPDDKSYDRHPIFGSLEEEVAYHNTYPTIYHLRKHLADNPEKADLRLVYTALAHIVKYRGHFLIEGELNTENTSISETFEQFLDTYSDIFKEQLVGDISKVEEILSSKQSRSRKHEQIMALFPNENKLGNFGRFMMLIVGNTSNFKPVFDLDDEYKLKLSDETYEEDLDTLLGMTDDVFLDVFMAAKNVYDAVEMSAIISTDTGNSKAVLSNQMINFYDEHKVDLAQLKQFFKTHLPDKYYECFSDPSKNGYAGYIDGKTNQEDFYKYIEKVMKTIKSDKKDYFLDKIDREVFLRKQRSFYNSVIPHQIHLQEMQAILDRQSQYYPFLAENRDKIESLVTFRIPYYVGPLTVSDQSEFAWMERQSDEPIRPWNFDEIVNKERSAEKFIERMTNMDTYLLEEKVLPKRSLLYQTFEVYNELTKVRYTNEQGKTEKLNRQQKAEIIETLFKQKNRVREKDIANYLEQYGYVDGTDIKGVEDKFNASLSTYNDLAKIDGAKAYLDDPEYADVWEDIIKILTIFEDKAMRKKQLQTYSDTLSPEILKKLERKHYTGWGRFSKKLINGLRDEGSNKTILDYLKSDEGSSGPTNRNFMQLIRDNTLSFKKKIEDAQTIEDTTHIYDTVAELPGSPAIKKGIRQALKIVEEIIDIIGYEPENIVVEMARESQTTKKGKDLSKERLEKLTEAIKEFDGPSDVKVKDLKNENLRNDRLYLYYLQNGRDMYTNEPLDINNLSKYDIDHIIPQSFTTDNSIDNKVLVSRTKNQGNKSDDVPSINIVHKMKPFWRQLHKAGLISDRKFKNLTKAEHGGLTEADRAHFLNRQLVETRQITKHVANLLDSQYNTAEEQRINIVLLKSSMTSRFRKEFKLYKVREINDYHHGHDAYLNAVVATTIMKVYPNLKPQFVYGQYKKTSMFKEEKATARKHFYSNITKFFKKEKVVNEETGEILWDTERHLSTIKRVLSWKQMNIVKKVEKQKGQLWKETIYPKGDSSKLIPVKEGMDPQKYGGLSQVSEAFAVVITHEKGKKKQLKSDLISIPIVDQKAYEQHPTAYLEEAGYNNPTVLHELFKYQLFELEDGSRRMIASAKEFQKGNQMVLPLELVELLYHANRYDKVKFPDSIEYVHDNLAKFDDLLEYVIDFSNKYINADKNVQKIQKIYKEHGTEDVELTVESFVNLMTFTAMGAPATFKFYGESITRSRYTSITEFRGSTLIFQSITGLYETRYKLEDN

SEQ ID NO: 932 - protein, 921 aa, Enterococcus faecalis
MIPHQIHLAELQAIIHRQAAYYPFLKENQEKIEQLVTFRIPYYVGPLSKGDASTFAWLKRQSEEPIRPWNLQETVDLDQSATAFIERMTNFDTYLPSEKVLPKHSLLYEKFMVFNELTKISYTDDRGIKANFSGKEKEKIFDYLFKTRRKVKKKDIIQFYRNEYNTEIVTLSGLEEDQFNASFSTYQDLLKCGLTRAELDHPDNAEKLEDIIKILTIFEDRQRIRTQLSTFKGQFSAEVLKKLERKHYTGWGRLSKKLINGIYDKESGKTILGYLIKDDGVSKHYNRNFMQLINDSQLSFKNAIQKAQSSEHEETLSETVNELAGSPAIKKGIYQSLKIVDELVAIMGYAPKRIVVEMARENQTTSTGKRRSIQRLKIVEKAMAEIGSNLLKEQPTTNEQLRDTRLFLYYMQNGKDMYTGDELSLHRLSHYDIDHIIPQSFMKDDSLDNLVLVGSTENRGKSDDVPSKEVVKDMKAYWEKLYAAGLISQRKFQRLTKGEQGGLTLEDKAHFIQRQLVETRQITKNVAGILDQRYNANSKEKKVQIITLKASLTSQFRSIFGLYKVREVNDYHHGQDAYLNCVVATTLLKVYPNLAPEFVYGEYPKFQTFKENKATAKAIIYTNLLRFFTEDEPRFTKDGEILWSNSYLKTIKKELNYHQMNIVKKVEVQKGGFSKESIKPKGPSNKLIPVKNGLDPQKYGGFDSPIVAYTVLFTHEKGKKPLIKQEILGITIMEKTRFEQNRILFLEEKGFLRPRVLMKLPKYTLYEFPEGRRRLLASAKEAQKGNQMVLPEHLLTLLYHAKQCLLPNQSESLTYVEQHQPEFQEILERVVDFAEVHTLAKSKVQQIVKLFEANQTADVKEIAASFIQLMQFNAMGAPSTFKFFQKDIERARYTSIKEIFDATIIYQSTTGLYETRRKVVD

SEQ ID NO: 933 - protein, 1337 aa, Enterococcus faecalis; identical to SEQ ID NO: 110

SEQ ID NO: 934 - protein, 1337 aa, Enterococcus faecalis
MKKDYVIGLDIGTNSVGWAVMTEDYQLVKKKMPIYGNTEKKKIKKNFWGVRLFEEGHTAEDRRLKRTARRRISRRRNRLRYLQAFFEEAMTALDENFFARLQESFLVPEDKKWHRHPIFAKLEDEVAYHETYPTIYHLRKKLADSSEQADLRLIYLALAHIVKYRGHFLIEGKLSTENISVKEQFQQFMIIYNQTFVNGESRLVSAPLPESVLIEEELTEKASRTKKSEKVLQQFPQEKANGLFGQFLKLMVGNKADFKKVFGLEEEAKITYASESYEEDLEGILAKVGDEYSDVFLAAKNVYDAVELSTILADSDKKSHAKLSSSMIVRFTEHQEDLKNFKRFIRENCPDEYDNLFKNEQKDGYAGYITHAGKVSQLKFYQYVKKIIQDIAGAEYFLEKIAQENFLRKQRTFDNGVIPHQIHLAELQAIIHRQAAYYPFLKENQEKIEQLVTFRIPYYVGPLSKGDANTFAWLKRQSEEPIRPWNLQETVDLDQSATAFIERMTNFDTYLPSEKVLPKHSLLYEKFMVFNELTKISYTDDRGIKANFSGKEKEKIFDYLFKTRRKVKKKDIIQFYRNEYNTEIVTLSGLEEDQFNASFSTYQDLLKCGLTRAELDHPDNAEKLEDIIKILTIFEDRQRIRTQLSTFKGQFSAEVLKKLERKHYTGWGRLSKKLINGIYDKESGKTILDYLIKDDGVSKHYNRNFMQLINDSQLSFKNAIQKAQSSEHEETLSETVNELAGSPAIKKGIYQSLKIVDELVAIMGYAPKRIVVEMARENQTTSTGKRRSIQRLKIVEKAMAEIGSNLLKEQPTTNEQLRDTRLFLYYMQNGKDMYTGDELSLHRLSHYDIDHIIPQSFMKDDSLDNLVLVGSTENRGKSDDVPSKEVVKDMKAYWEKLYAAGLISQRKFQRLTKGEQGGLTLEDKAHFIQRQLVETRQITKNVAGILDQRYNAKSKEKKVQIITLKASLTSQFRSIFGLYKVREVNDYHHGQDAYLNCVVATTLLKVYPNLAPEFVYGEYPKFQTFKENKATAKAIIYTNLLRFFTEDEPRFTKDGEILWSNSYLKTIKKELNYHQMNIVKKVEVQKGGFSKESIKPKGPSNKLIPVKNGLDPQKYGGFDSPIVAYTVLFTHEKGKKPLIKQEILGITIMEKTRFEQNPILFLEEKGFLRPRVLMKLPKYTLYQFPEGRRRLLASAKEAQKGNQMVLPEHLLTLLYHAKQCLLPNQSESLAYVEQHQPEFQEILERVVDFAEVHTLAKSKVQQIVKLFEANQTADVKEIAASFIQLMQFNAMGAPSTFKFFQKDIERARYTSIKEIFDATIIYQSTTGLYETRRKVVD

SEQ ID NO: 935 - protein, 1337 aa, Enterococcus faecalis
MKKDYVIGLDIGTNSVGWAVMTEDYQLVKKKMPIYGNTEKKKIKKNFWGVRLFEEGHTAEDRRLKRTARRRISRRRNRLRYLQAFFEEAMTALDENFFARLQESFLVPEDKKWHRHPIFAKLEDEVAYHETYPTIYHLRKKLADSSEQADLRLIYLALAHIVKYRGHFLIEGKLSTENISVKEQFQQFMIIYNQTFVNGESRLVSTPLPESVLIEEELTEKASRTKKSEKVLQQFPQEKANGLFGQFLKLMVGNKADFKKVFGLEEEAKITYASESYEEDLEGILAKVGDEYSDVFLAAKNVYDAVELSTILADSDKKSHAKLSSSMIVRFTEHQEDLKNFKRFIRENCPDEYDNLFKNEQKDGYAGYITHAGKVSQLKFYQYVKKIIQDIAGAEYFLEKIAQENFLRKQRTFDNGVIPHQIHLAELQAIIHRQAAYYPFLKENQEKIEQLVTFRIPYYVGPLSKGDASTFAWLKRQSEEPIRPWNLQETVDLDQSATAFIERMTNFDTYLPSEKVLPKHSLLYEKFMVFNELTKISYTDDRGIKANFSGKEKEKIFDYLFKTRRKVKKKDIIQFYRNEYNTEIVTLSGLEEDQFNASFSTYQDLLKCGLTRAELDHPDNAEKLEDIIKILTIFEDRQRIRTQLSTFKGQFSAEVLKKLERKHYTGWGRLSKKLINGIYDKESGKTILDYLVKDDGVSKHYNRNFMQLINDSQLSFKNAIQKAQSSEHEETLSETVNELAGSPAIKKGIYQSLKIVDELVAIMGYAPKRIVVEMARENQTTSTGKRRSIQRLKIVEKAMAEIGSNLLKEQPTTNEQLRDTRLFLYYMQNGKDMYTGDELSLHRLSHYDIDHIIPQSFMKDDSLDNLVLVGSTENRGKSDDVPSKEVVKDMKAYWEKLYAAGLISQRKFQRLTKGEQGGLTLEDKAHFIQRQLVETRQITKNVAGILDQRYNAKSKEKKVQIITLKASLTSQFRSIFGLYKVREVNDYHHGQDAYLNCVVATTLLKVYPNLAPEFVYGEYPKFQTFKENKATAKAIIYTNLLRFFTEDEPRFTKDGEILWSNSYLKTIKKELNYHQMNIVKKVEVQKGGFSKESIKPKGPSNKLIPVKNGLDPQKYGGFDSPIVAYTVLFTHEKGKKPLIKQEILGITIMEKTRFEQNPILFLEEKGFLRPRVLMKLPKYTLYEFPEGRRRLLASAKEAQKGNQMVLPEHLLTLLYHAKQCLLPNQSESLAYVEQHQPEFQEILERVVDFAEVHTLAKSKVQQIVKLFEANQTADVKEIAASFIQLMQFNAMGAPSTFKFFQKDIERARYTSIKEIFDATIIYQSTTGLYETRRKVVD

SEQ ID NO: 936 - protein, 1337 aa, Enterococcus faecalis
MKKDYVIGLDIGTNSVGWAVMTEDYQLVKKKMPIYGNTEKKKIKKNFWGVRLFEEGHTAEDRRLKRTARRRISRRRNRLRYLQAFFEEAMTDLDENFFARLQESFLVPEDKKWHRHPIFAKLEDEVAYHETYPTIYHLRKKLADSSEQADLRLIYLALAHIVKYRGHFLIEGKLSTENISVKEQFQQFMIIYNQTFVNGESRLVSAPLPESVLIEEELTEKASRTKKSEKVLQQFPQEKANGLFGQFLKLMVGNKADFKKVFGLEEEAKITYASESYEEDLEGILAKVGDEYSDVFLAAKNVYDAVELSTILADSDKKSHAKLSSSMIVRFTEHQEDLKKFKRFIRENCPDEYDNLFKNEQKDGYAGYIAHAGKVSQLKFYQYVKKIIQDIAGAEYFLEKIAQENFLRKQRTFDNGVIPHQIHLAELQAIIHRQAAYYPFLKENQEKIEQLVTFRIPYYVGPLSKGDASTFAWLKRQSEEPIRPWNLQETVDLDQSATAFIERMTNFDTYLPSEKVLPKHSLLYEKFMVFNELTKISYTDDRGIKANFSGKEKEKIFDYLFKTRRKVKKKDIIQFYRNEYNTEIVTLSGLEEDQFNASFSTYQDLLKCGLTRAELDHPDNAEKLEDIIKILTIFEDRQRIRTQLSTFKGQFSAEVLKKLERKHYTGWGRLSKKLINGIYDKESGKTILGYLIKDDGVSKHYNRNFMQLINDSQLSFKNAIQKAQSSEHEETLSETVNELAGSPAIKKGIYQSLKIVDELVAIMGYAPKRIVVEMARENQTTSTGKRRSIQRLKIVEKAMAEIGSNLLKEQPTTNEQLRDTRLFLYYMQNGKDMYTGDELSLHRLSHYDIDHIIPQSFMKDDSLDNLVLVGSTENRGKSDDVPSKEVVKDMKAYWEKLYAAGLISQRKFQRLTKGEQGGLTLEDKAHFIQRQLVETRQITKNVAGILDQRYNANSKEKKVQIITLKASLTSQFRSIFGLYKVREVNDYHHGQDAYLNCVVATTLLKVYPNLAPEFVYGEYPKFQTFKENKATAKAIIYTNLLRFFTEDEPRFTKDGEILWSNSYLKTIKKELNYHQMNIVKKVEVQKGGFSKESIKPKGPSNKLIPVKNGLDPQKYGGFDSPIVAYTVLFTHEKGKKPLIKQEILGITIMEKTRFEQNPILFLEEKGFLRPRVLMKLPKYTLYEFPEGRRRLLASAKEAQKGNQMVLPEHLLTLLYHAKQCLLPNQSESLAYVEQHQPEFQEILERVVDFAEVHTLAKSKVQQIVKLFEANQTADVKEIAASFIQLMQFNAMGAPSTFKFFQKDIERARYTSIKEIFDATIIYQSTTGLYETRRKVVD

SEQ ID NO: 937 - protein, 936 aa, Enterococcus faecalis
MKKDYVIGLDIGTNSVGWAVMTEDYQLVKKKMPIYGNTEKKKIKKNFWGVRLFEEGHTAEDRRLKRTARRRISRRRNRLRYLQAFFEEAMTDLDENFFARLQESFLVPEDKKWHRHPIFAKLEDEVAYHETYPTIYHLRKKLADSSEQADLRLIYLALAHIVKYRGHFLIEGKLSTENISVKEQFQQFMIIYNQTFVNGESRLVSAPLPESVLIEEELTEKASRTKKSEKVLQQFPQEKANGLFGQFLKLMVGNKADFKKVFGLEEEAKITYASESYEEDLEGILAKVGDEYSDVFLAAKNVYDAVELSTILADSDKKSHAKLSSSMIVRFTEHQEDLKKFKRFIRENCPDEYDNLFKNEQKDGYAGYIAHAGKVSQLKFYQYVKKIIQDIAGAEYFLEKIAQENFLRKQRTFDNGVIPHQIHLAELQAIIHRQAAYYPFLKENQEKIEQLVTFRIPYYVGPLSKGDASTFAWLKRQSEEPIRPWNLQETVDLDQSATAFIERMTNFDTYLPSEKVLPKHSLLYEKFMVFNELTKISYTDDRGIKANFSGKEKEKIFDYLFKTRRKVKKKDIIQFYRNEYNTEIVTLSGLEEDQFNASFSTYQDLLKCGLTRAELDHPDNAEKLEDIIKILTIFEDRQRIRTQLSTFKGQFSAEVLKKLERKHYTGWGRLSKKLINGIYDKESGKTILGYLIKDDGVSKHYNRNFMQLINDSQLSFKNAIQKAQSSEHEETLSETVNELAGSPAIKKGIYQSLKIVDELVAIMGYAPKRIVVEMARENQTTSTGKRRSIQRLKIVEKAMAEIGSNLLKEQPTTNEQLRDTRLFLYYMQNGKDMYTGDELSLHRLSHYDIDHIIPQSFMKDDSLDNLVLVGSTENRGKSDDVPSKEVVKDMKAYWEKLYAAGLISQRKFQRLTKGEQGGLTLEDKAHFIQRQLVETR

SEQ ID NO: 938 - protein, 1337 aa, Enterococcus faecalis
MKKDYVIGLDIGTNSVGWAVMTEDYQLVKKKMPIYGNTEKKKIKKNFWGVRLFEEGHTAEDRRLKRTARRRISRRRNRLRYLQAFFEEAMTDLDENFFARLQESFLVPEDKKWHRHPIFAKLEDEVAYHETYPTIYHLRKKLADSSEQADLRLIYLALAHIVKYRGHFLIEGKLSTENISVKEQFQQFMIIYNQTFVNGESRLVSAPLPESVLIEEELTEKASRTKKSEKVLQQFPQEKANGLFGQFLKLMVGNKADFKKVFGLEEEAKITYASESYEEDLEGILAKVGDEYSDVFLAAKNVYDAVELSTILADSDKKSHAKLSSSMIVRFTEHQEDLKKFKRFIRENCPDEYDNLFKNEQKDGYAGYIAHAGKVSQLKFYQYVKKIIQDIAGAEYFLEKIAQENFLRKQRTFDNGVIPHQIHLAELQAIIHRQAAYYPFLKENQEKIEQLVTFRIPYYVGPLSKGDASTFAWLKRQSEEPIRPWNLQETVDLDQSATAFIERMTNFDTYLPSEKVLPKHSLLYEKFMVFNELTKISYTDDRGIKANFSGKEKEKIFDYLFKTRRKVKKKDIIQFYRNEYNTEIVTLSGLEEDQFNASFSTYQDLLKCGLTRAELDHPDNAEKLEDIIKILTIFEDRQRIRTQLSTFKGQFSAEVLKKLERKHYTGWGRLSKKLINGIYDKESGKTILDYLVKDDGVSKHYNRNFMQLINDSQLSFKNAIQKAQSSEHEETLSETVNELAGSPAIKKGIYQSLKIVDELVAIMGYAPKRIVVEMARENQTTSTGKRRSIQRLKIVEKAMAEIGSNLLKEQPTTNEQLRDTRLFLYYMQNGKDMYTGDELSLHRLSHYDIDHIIPQSFMKDDSLDNLVLVGSTENRGKSDDVPSKEVVKDMKAYWEKLYAAGLISQRKFQRLTKGEQGGLTLEDKAHFIQRQLVETRQITKNVAGILNQRYNANSKEKKVQIITLKASLTSQFRSIFGLYKVREVNDYHHGQDAYLNCVVATTLLKVYPNLAPEFVYGEYPKFQTFKENKATAKAIIYTNLLRFFTEDEPRFTKDGEILWSNSYLKTIKKELNYHQMNIVKKVEVQKGGFSKESIKPKGPSNKLIPVKNGLDPQKYGGFDSPVVAYTVLFTHEKGKKPLIKQEILGITIMEKTRFEQNPILFLEEKGFLRPRVLMKLPKYTLYEFPEGRRRLLASAKEAQKGNQMVLPEHLLTLLYHAKQCLLPNQSESLAYVEQHQPEFQEILERVVDFAEVHTLAKSKVQQIVKLFEANQTADVKEIAASFIQLMQFNAMGAPSTFKFFQKDIERARYTSIKEIFDATIIYQSTTGLYETRRKVVD

SEQ ID NO: 939 - protein, 1337 aa, Enterococcus faecalis
MKKDYVIGLDIGTNSVGWAVMTEDYQLVKKKMPIYGNTEKKKIKKNFWGVRLFEEGHTAEDRRLKRTARRRISRRRNRLRYLQAFFEEAMTDLDENFFARLQESFLVPEDKKWHRHPIFAKLEDEVAYHETYPTIYHLRKKLADSSEQADLRLIYLALAHIVKYRGHFLIEGKLSTENISVKEQFQQFMIIYNQTFVNGESRLVSAPLPESVLIEEELTEKASRTKKSEKVLQQFPQEKANGLFGQFLKLMVGNKADFKKVFGLEEEAKITYASESYEEDLEGILAKVGDEYSDVFLAAKNVYDAVELSTILADSDKKSHAKLSSSMIVRFTEHQEDLKKFKRFIRENCPDEYDNLFKNEQKDGYAGYIAHAGKVSQLKFYQYVKKIIQDIAGAEYFLEKIAQENFLRKQRTFDNGVIPHQIHLAELQAIIHRQAAYYPFLKENQEKIEQLVTFRIPYYVGPLSKGDASTFAWLKRQSEEPIRPWNLQETVDLDQSATAFIERMTNFDTYLPSEKVLPKHSLLYEKFMVFNELTKISYTDDRGIKANFSGKEKEKIFDYLFKTRRKVKKKDIIQFYRNEYNTEIVTLSGLEEDQFNASFSTYQDLLKCGLTRAELDHPDNAEKLEDIIKILTIFEDRQRIRTQLSTFKGQFSAEVLKKLERKHYTGWGRLSKKLINGIYDKESGKTILGYLIKDDGVSKHYNRNFMQLINDSQLSFKNAIQKAQSSEHEETLSETVNELAGSPAIKKGIYQSLKIVDELVAIMGYAPKRIVVEMARENQTTSTGKRRSIQRLKIVEKAMAEIGSNLLKEQPTTNEQLRDTRLFLYYMQNGKDMYTGDELSLHRLSHYDIDHIIPQSFMKDDSLDNLVLVGSTENLGKSDDVPSKEVVKDMKAYWEKLYAAGLISQRKFQRLTKGEQGGLTLEDKAHFIQRQLVETRQITKNVAGILDQRYNANSKEKKVQIITLKASLTSQFRSIFGLYKVREVNDYHHGQDAYLNCVVATTLLKVYPNLAPEFVYGEYPKFQTFKENKATAKAIIYTNLLRFFTEDEPRFTKDGEILWSNSYLKTIKKELNYHQMNIVKKVEVQKGGFSKESIKPKGPSNKLIPVKNGLDPQKYGGFDSPIVAYTVLFTHEKGKKPLIKQEILGITIMEKTRFEQNPILFLEEKGFLRPRVLMKLPKYTLYEFPEGRRRLLASAKEAQKGNQMVLPEHLLTLLYHAKQCLLPNQSESLAYVEQHQPEFQEILERVVDFAEVHTLAKSKVQQIVKLFEANQTADVKEIAASFIQLMQFNAMGAPSTFKFFQKDIERARYTSIKEIFDATIIYQSTTGLYETRRKVVD

SEQ ID NO: 940 - protein, 1337 aa, Enterococcus faecalis
MKKDYVIGLDIGTNSVGWAVMTEDYQLVKKKMPIYGNTEKKKIKKNFWGVRLFEEGHTAEDRRLKRTARRRISRRRNRLRYLQAFFEEAMTDLDENFFARLQESFLVPEDKKWHRHPIFAKLEDEVAYHETYPTIYHLRKKLADSSEQADLRLIYLALAHIVKYRGHFLIEGKLSTENTSVKEQFQQFMVIYNQTFVNGESRLVSAPLPESVLIEEELTEKASRTKKSEKVLQQFPQEKANGLFGQFLKLMVGNKADFKKVFGLEEEAKITYASESYEEDLEGILAKVGDEYSDVFLAAKNVYDAVELSTILADSDKKSHAKLSSSMIVRFTEHQEDLKKFKRFIRENCPDEYDNLFKNEQKDGYAGYIAHAGKVSQLKFYQYVKKIIQDIAGAEYFLEKIAQENFLRKQRTFDNGVIPHQIHLAELQAIIHRQAAYYPFLKENQEKIEQLVTFRIPYYVGPLSKGDASTFAWLKRQSEEPIRPWNLQETVDLDQSATAFIERMTNFDTYLPSEKVLPKHSLLYEKFMVFNELTKISYTDDRGIKANFSGKEKEKIFDYLFKTRRKVKKKDIIQFYRNEYNTEIVTLSGLEEDQFNASFSTYQDLLKCGLTRAELDHPDNAEKLEDIIKILTIFEDRQRIRTQLSTFKGQFSAEVLKKLERKHYTGWGRLSKKLINGIYDKESGKTILDYLVKDDGVSKHYNRNFMQLINDSQLSFKNAIQKAQSSEHEETLSETVNELAGSPAIKKGIYQSLKIVDELVAIMGYAPKRIVVEMARENQTTSTGKRRSIQRLKIVEKAMAEIGSNLLKEQPTTNEQLRDTRLFLYYMQNGKDMYTGDELSLHRLSHYDIDHIIPQSFMKDDSLDNLVLVGSTENRGKSDDVPSKKVVKKMKAYWEKLYAAGLISQRKFQRLTKGEQGGLTLEDKAHFIQRQLVETRQITKNVAGILDQRYNAKSKEKKVQIITLKASLTSQFRSIFGLYKVREVNDYHHGQDAYLNCVVATTLLKVYPNLAPEFVYGEYPKFQAFKENKATAKTIIYTNLMRFFTEDEPRFTKDSEILWSNSYLKTIKKELNYHQMNIVKKVEVQKGGFSKESIKPKGPSNKLIPVKNGLDPQKYGGFDSPVVAYTVLFTHEKGKKPLIKQEILGITIMEKTRFEQNPILFLEEKGFLRPRVLMKLPKYTLYEFPEGRRRLLASAKEAQKGNQMVLPEHLLTLLYHAKQCLLPNQSESLAYVEQHQPEFQEILERVVDFAEVHTLAKSKVQQIVKLFEANQTADVKEIAASFIQLMQFNAMGAPSTFKFFQKDIERARYTSIKEIFDATIIYQSTTGLYETRRKVVD

SEQ ID NO: 941 - protein, 1150 aa, Enterococcus faecalis
MYSIGLDLGISSVGWSVIDERTGNVIDLGVRLFSAKNSEKNLERRTNRGGRRLIRRKTNRLKDAKKILAAVGFYEDKSLKNSCPYQLRVKGLTEPLSKGEIYKVTLHILKKRGISYLDEDDTEAAKESQDYKEQVRENAQLLTKYTPGQIQLQRLKENNRVKTGINAQGNYQLNVFKVSAYANELATILKTQQAFYPNELTDDWIALFVQPGIAEEAGLIYRKRPYYHGPGNEANNSPYGRWSDFKKTGQPATNIFDKLIGKDFQGELRASGLSLSAQQYNLLNDLTNLKIDGEIPLSPEQKEYILAELMTKEFTRFGVNDVVKLLGVKKERLSGWRLDKKGKPEIHTLKGYRNWRKIFAESGIDLAMLPTETIDCLAKILTLNTEREGIENTLAFELPELAESVKLLVLDRYKELSQSVSTQAWHRFSLKTLHLLIPELMNATSEQNTLLEQFQLKSDVRKRYSEYKKLPTKDVLTEIYNPTVNKTVSQAFKVIDALLVKYGKEQIRYITIEMPRDDNEEDEKKRIKELHAKNSQRKNDSQSYFMQKSGWSQEKFQTTIQKNRRFLAKLLYYYEQDGICAYTGLSISPELLVSDSTEIDHIIPISISLDDSINNKVLVLSKANQVKGQQTPYDAWMDGSFKKINGKFSNWDDYQKWVESRHFSHKKENNLLETRNIFDSEQVEKFLARNLNDTRYASRLVLNTLQSFFANQETKVRVVNGSFTHTLRKKWGADLDKTRETHHHHAVDATLCAVTPFVKVSRYHYAVKEETGEKVMREIDFETGEIVDEMSYREFKKSKKYERKTYQVKWPNFREQLKPVNLHPRIKFSHQVDRKANRKLSDATIYSVREKTEVKTLKSGKQKITTDEYTIGKIKDIYTVDGWEAFKKKQDKLLMKDLDEKTYERLLSIAETTPDFQEVEEKNGKVKRVKRSPFAVYCEENDIPAIRKYAKKNNGPLIRSLKYYDGKLNKHINITKDSQGRPVEKTKNGRKVTLQSLKPYRYDIYQDLETKAYYTVQLYYSDLRFVEGKYGITEKEYMKKVAEQTKGQVVRFCFSLQKNDGLEIEWKDSQRYDVRFYNFQSANSINFKGLEQEMMPAENQFKQKPYNNGAINLNIAKYGKEGKKLRKFNTDILGKKHYLYYEKEPKNIIK

SEQ ID NO: 942 - protein, 1150 aa, Enterococcus faecalis
MYSIGLDLGISSVGWSVIDERTGNVIDLGVRLFSAKNSEKNLERRTNRGGRRLIRRKTNRLKDAKKILAAVGFYEDKSLKNSCPYQLRVKGLTEPLSKGEIYKVTLHILKKRGISYLDEDDTEAAKESQDYKEQVRKNAQLLTKYTPGQIQLQRLKENNRVKTGINAQGNYQLNVFKVSAYANELATILKTQQAFYPNELTDDWIALFVQPGIAEEAGLIYRKRPYYHGPGNEANNSPYGRWSDFKKTGQPATNIFDRLIGKDFQGELRASGLSLSAQQYNLLNDLTNLKIDGEIPLSPEQKEYILAELMTKEFTRFGVNDVAKLLGVKKERLSGWRLDKKGKPEIHTLKGYRNWRKIFAESGIDLATLPTETIDCLAKVLTLNTEHEGIENTLAFELPELAESVKLLVLDRYKELSQSVSTQAWHRFSLKTLHLLIPELMNATSEQNTLLEQFQLKSDVRKRYSEYKKLPTKDVLTEIYNPTVNKTVSQAFKVIDALLVKYGKEQIRYITIEMPRDDNEEDEKKRIKELHAKNSQRKNDSQSYFMQKSGWSQEKFQTTIQKNRRFLAKLLYYYEQDGICAYTGLSISPELLVSDSTEIDHIIPISISLDDSINNKVLVLSKANQVKGQQTPYDAWMDGSFKKINGKFSNWDDYQKWVESRHFSHKKENNLLETRNIFDSEQVEKFLARNLNDTRYASRLVLNTLQSFFANHETKVRVVNGSFTHTLRKKWGADLDKTRETHHHHAVDATLCAVTPFVKVSRYHYAVKEETGEKVMREIDFETGEIVDEMSYQEFKKSKKYERKTYQVKWPNFREQLKPVNLHPRIKFSHQVDRKANRKLSDATIYSVREKTEVKTLKSGKQKITTDEYTIGKIKDIYTVDGWEAFKKKQDKLLMKDLDEKTYERLLSIAETTPDFQEVEEKNGKVKRVKRSPFAVYCEENDIPAIQKYAKKNNGPLIRSLKYYDGKLNKHINITKDSQGRPVEKTKNGRKVTLQSLKPYRYDIYQDLETKAYYTVQLYYSDLRFVEGKYGITEKEYMKKVAEQTKGQVVRFCFSLQKNDGLEIEWKDSQRYDVRFYNFQSANSINFKGLEQEMMPAENQFKQKPYNNGAINLNIAKYGKEGKKLRKFNTDILGKKHYLYYEKEPKNIIK

SEQ ID NO: 943 - protein, 1150 aa, Enterococcus faecalis
MYSIGLDLGISSVGWSVIDERTGNVIDLGVRLFSAKNSEKNLERRTNRGGRRLIRRKTNRLKDAKKILAAVGFYEDKSLKNSCPYQLRVKGLTEPLSKGEIYKVTLHILKKRGISYLDEDDTEAAKESQDYKEQVRKNAQLLTKYTPGQIQLQRLKENNRVKTGINVQGNYQLNVFKVSAYANELATILKTQQAFYPNELTDDWIALFVQPGIAEEAGLIYRKRPYYHGPGNEANNSPYGRWSDFQKTGEPATNIFDKLIGKDFQGELRASGLSLSAQQYNLLNDLTNLKIDGEVPLSSEQKEYILTELMTKEFTRFGVNDVVKLLGVKKERLSGWRLDKKGKPEIHTLKGYRNWRKIFAEAGIDLATLPTETIDCLAKVLTLNTEREGIENTLAFELPELSESVKLLVLDRYKELSQSISTQSWHRFSLKTLHLLIPELMNATSEQNTLLEQFQLKSDVRKRYSEYKKLPTKDVLAEIYNPTVNKTVSQAFKVIDALLVKYGKEQIRYITIEMPRDDNEEDEKKRIKELHAKNSQRKNDSQSYFMQKSGWSQEKFQTTIQKNRRFLAKLLYYYEQDGICAYTGLPISPELLVSDSTEIDHIIPISISLDDSINNKVLVLSKANQVKGQQTPYDAWMDGSFKKINGKFSNWDDYQKWVESRHFSHKKENNLLETRNIFDSEQVEKFLARNLNDTRYASRLVLNTLQSFFTNQETKVRVVNGSFTHTLRKKWGADLDKTRETHHHHAVDATLCAVTPFVKVSRYHYAVKEETGEKVMREIDFETGEIVNEMSYREFKKSKKYERKTYQVKWPNFREQLKPVNLHPRIKFSHQVDRKANRKLSDATIYSVREKTEVKTLKSGKQKITTDEYTIGKIKDIYTLDGWEAFKKKQDKLLMKDLDEKTYERLLSIAETTPDFQEVEEKNGKVKRVKRSPFAVYCEENDIPAIQKYAKKNNGPLIRSLKYYDGKLNKHINITKDSQGRPVEKTKNGRKVTLQSLKPYRYDIYQDLETKAYYTVQLYYSDLRFVEGKYGITEKEYMKKVAEQTKGQVVRFCFSLQKNDGLEIEWKDSQRYDVRFYNFQSANSINFKGLEQEIMPAENQFKQKPYNNGAINLNIAKYGKEGKKLRKFNTDILGKKHYLFYEKEPKNIIK

SEQ ID NO: 944 - protein, 1150 aa, Enterococcus faecalis; identical to SEQ ID NO: 178

SEQ ID NO: 945 - protein, 1150 aa, Enterococcus faecalis; identical to SEQ ID NO: 179

SEQ ID NO: 946 - protein, 1340 aa, Enterococcus faecium
MKKEYTIGLDIGTNSVGWSVLTDDYRLVSKKMKVAGNTEKSSTKKNFWGVRLFDEGQTAEARRSKRTARRRLARRRQRILELQKIFAPEILKIDEHFFARLNESFLVLDEKKQSRHPVFATIKQEKSYHQTYPTIYHLRQALADSSEKADIRLVYLAMAHLLKYRGHFLIEGELNTENSSVTETFRQFLSTYNQQFSEADDKQTEKLDEAVDCSFVFTEKMSKTKKAETLLKYFPHEKSNGYLSQFIKLMVGNQGNFKNVFGLEEEAKLQFSKETYEEDLEELLEKIGDDYIDLFVQAKNVYDAVLLSEILSDSTKNTRAKLSAGMIRRYDAHKEDLVLLKRFVKENLPKKYRAFFGDNSVNGYAGYIEGHATQEDFYKFVKKELTGIRGSEVFLTKIEQENFLRKQRTFDNGVIPHQIHLTELRAIIANQKKHYPFLKEEQEKLESLLTFKIPYYVGPLAKKQENSPFAWLIRKSEEKIKPWNLPEIVDMEGSAVRFIERMNNTDMYIPHNKVLPKNSLLYQKFSIYNELTKVRYQDERGQMNYFSSIEKKEIFHELFEKNRKVTKKDLQEFLYLKYDIKHAELSGIEKAFNASYTTYHDFLTMSENKREMKQWLEDPELASMFEEIIKTLTVFEDREMIKTRLSHHEATLGKHIIKKLTKKHYTGWGRLSKELIQGIRDKQSNKTILDYLINDDDFPHHRNRNFMQLINDDSLSFKKEIKKAQMITDTENLEEIVKELTGSPAIKKGILQSLKIVDEIVGIMGYEPANIVVEMARENQTTGRGLKSSRPRLKALEESLKDFGSQLLKEYPTDNSSLQKDRLYLYYLQNGRDMYTGAPLDIHRLSDYDIDHIIPRSFTTDNSIDNKVLVSSKENRLKKDDVPSEKVVKKMRSFWYDLYSSKLISKRKLDNLTKIKLTEEDKAGFIKRQLVETRQITKHVAGILHHRFNKAEDTNEPIRKVRIITLKSALVSQFRNRFGIYKVREINEYHHAHDAYLNGVVALALLKKYPQLAPEFVYGEYLKFNAHKANKATVKKEFYSNIMKFFESDTPVCDENGEIFWDKSKSIAQVKKVINHHHMNIVKKTEIQKGGFSKETVEPKKDSSKLLPRKNNWDPAKYGGLGSPNVAYTVAFTYEKGKARKRTNALEGITIMEREAFEQSPVLFLKNKGYEQAEIEMKLPKYALFELENGRKRMVASNKEAQKANSFLLPEHLVTLLYHAKQYDEISHKESFDYVNEHHKEFSEVFARVLEFAGKYTLAEKNIEKLEKIYKENQTDDLAKLASSFVNLMQFNAMGAPADFKFFDVTIPRKRYTSLTEIWQSTIIHQSITGLYETRIRMGK

SEQ ID NO: 947 - protein, 1339 aa, Enterococcus faecium
MKKEYTIGLDIGTNSVGWSVLTDDYRLVSKKMKVAGNTEKSSTKKNFWGVRLFDEGQTAEARRSKRTARRRLARRRQRILELQKIFAPEILKIDEHFFARLNESFLVLDEKKQSRHPVFATIKQEKSYHQTYPTIYHLRQALADSSEKADIRLVYLAMAHLLKYRGHFLIEGELNTENSSVTETFRQFLSTYNQQFSEADDKQTEKLDEAVDCSFVFTEKMSKTKKAETLLKYFPHEKSNGYLSQFIKLMVGNQGNFKNVFGLEEAKLQFSKETYEEDLEELLEKIGDDYIDLFVQAKNVYDAVLLSEILSDSTKNTRAKLSAGMIRRYDAHKEDLVLLKRFVKENLPKKYRAFFGDNSVNGYAGYIEGHATQEDFYKFVKKELTGIRGSEVFLTKIEQENFLRKQRTFDNGVIPHQIHLTELRAIIANQKKHYPFLKEEQEKLESLLTFKIPYYVGPLAKKQENSPFAWLIRKSEEKIKPWNLPEIVDMEGSAVRFIERMINTDMYMPHNKVLPKNSLLYQKFSIYNELTKVRYQDERGQMNYFSSIEKKEIFHELFEKNRKVTKKDLQEFLYLKYDIKHAELSGIEKAFNASYTTYHDFLTMSENKREMKQWLEDPELASMFEEIIKTLTVFEDREMIKTRLSHHEATLGKHIIKKLTKKHYTGWGRLSKELIQGIRDKQSNKTILDYLINDDDFPHHRNRNFMQLINDDSLSFKKEIKKAQMITDTENLEEIVKELTGSPAIKKGILQSLKIVDEIVGIMGYEPANIVVEMARENQTTGRGLKSSRPRLKALEESLKDFGSQLLKEYPTDNSSLQKDRLYLYYLQNGRDMYTGAPLDIHRLSDYDIDHIIPRSFTTDNSIDNKVLVSSKENRLKKDDVPSEKVVKKMRSFWYDLYSSKLISKRKLDNLTKIKLTEEDKAGFIKRQLVETRQITKHVAGILHHRFNKAEDTNEPIRKVRIITLKSALVSQFRNRFGIYKVREINEYHHAHDAYLNGVVALALLKKYPQLAPEFVYGEYLKFNAHKANKATVKKEFYSNIMKFFESDTPVCDENGEIFWDKSKSIAQVKKVINHHHMNIVKKTEIQKGGFSKETVEPKKDSSKLLPRKNNWDPAKYGGLGSPNVAYTVAFTYEKGKARKRTNALEGITIMEREAFEQSPVLFLKNKGYEQAEIEMKLPKYALFELENGRKRMVASNKEAQKANSFLLPEHLVTLLYHAKQYDEISHKESFDYVNEHHKEFSEVFARVLEFAGKYTLAEKNIEKLEKIYKENQTDDLAKLASSFVNLMQFNAMGAPADFKFFDVTIPRKRYTSLTEIWQSTIIHQSITGLYETRIRMGK

SEQ ID NO: 948 - protein, 1340 aa, Enterococcus faecium
MKKEYTIGLDIGTNSVGWSVLTDDYRLVSKKMKVAGNTEKSSTKKNFWGVRLFDEGQTAEARRSKRTARRRLARRRQRILELQKIFAPEILKIDEHFFARLNESFLVLDEKKQSRHPVFATIKQEKSYHQTYPTIYHLRQALADSSEKADIRLVYLAMAHLLKYRGHFLIEGELNTENSSVTETFRQFLSTYNQQFSEADDKQTEKLDEAVDCSFVFTEKMSKTKKAETLLKYFPHEKSNGYLSQFIKLMVGNQGNFKNVFGLEEEAKLQFSKETYEEDLEELLEKIGDDYIDLFVQAKNVYDAVLLSEILSDSTKNTRAKLSAGMIRRYDAHKEDLVLLKRFVKENLPKKYRAFFGDNSVNGYAGYIEGHATQEDFYKFVKKELTGIRGSEVFLTKIEQENFLRKQRTFDNGVIPHQIHLTELRAIIANQKKHYPFLKEEQEKLESLLTFKIPYYVGPLAKKQENSPFAWLIRKSEEKIKPWNLPEIVDMEGSAVRFIERMINTDMYIPHNKVLPKNSLLYQKFSIYNELTKVRYQDERGQMNYFSSIEKKEIFHELFEKNRKVTKKDLQEFLYLKYDIKHAELSGIEKAFNASYTTYHDFLTMSENKREMKQWLEDPELASMFEEIIKTLTVFEDREMIKTRLSHHEATLGKHIIKKLTKKHYTGWGRLSKELIQGIRDKQSNKTILDYLINDDDFPHHRNRNFMQLINDDSLSFKKEIKKAQMITDTENLEEIVKELTGSPAIKKGILQSLKIVDEIVGIMGYEPANIVVEMARENQTTGRGLKSSRPRLKALEESLKDFGSQLLKEYPTDNSSLQKDRLYLYYLQNGRDMYTGAPLDIHRLSDYDIDHIIPRSFTTDNSIDNKVLVSSKENRLKKDDVPSEKVVKKMRSFWYDLYSSKLISKRKLDNLTKIKLTEEDKAGFIKRQLVETRQITKHVAGILHHRFNKAEDTNEPIRKVRIITLKSALVSQFRNRFGIYKVREINEYHHAHDAYLNGVVALALLKKYPQLAPEFVYGEYLKFNAHKANKATVKKEFYSNIMKFFESDTPVCDENGEIFWDKSKSIAQVKKVINHHHMNIVKKTEIQKGGFSKETVEPKKDSSKLLPRKNNWDPAKYGGLGSPNVAYTVAFTYEKGKARKRTNALEGITIMEREAFEQSPVLFLKNKGYEQAEIEMKLPKYALFELENGRKRMVASNKEAQKANSFLLPEHLVTLLYHAKQYDEISHKESFDYVNEHHKEFSEVFARVLEFAGKYTLAEKNIEKLEKIYKENQTDDLAKLASSFVNLMQFNAMGAPADFKFFDVTIPRKRYTSLTEIWQSTIIHQSITGLYETRIRMGK

SEQ ID NO: 949 - protein, 1340 aa, Enterococcus faecium
MKKEYTIGLDIGTNSVGWSVLTDDYRLVSKKMKVAGNTEKSSTKKNFWGVRLFDEGQTAEARRSKRTARRRLARRRQRILELQKIFAPEILKIDEHFFARLNESFLVLDEKKQSRHPVFATIKQEKSYHQTYPTIYHLRQALADSSEKADIRLVYLAMAHLLKYRGHFLIEGELNTENSSVTETFRQFLSTYNQQFSEADDKQTEKLDEAVDCSFVFTEKMSKTKKAETLLKYFPHEKSNGYLSQFIKLMVGNQGNFKNVFGLEEEAKLQFSKETYEEDLEELLEKIGDDYIDLFVQAKNVYDAVLLSEILSDSTKNTRAKLSAGMIRRYDAHKEDLVLLKRFVKENLPKKYRAFFGDNSVNGYAGYIEGHATQEDFYKFVKKELTGIRGSEVFLTKIEQENFLRKQRTFDNGVIPHQIHLTELRAIIANQKKHYPFLKEEQEKLESLLTFKIPYYVGPLAKKQENSPFAWLIRKSEEKIKPWNLPEIVDMEGSAVRFIERMINTDMYMPHNKVLPKNSLLYQKFSIYNELTKVRYQDERGQMNYFSSIEKKEIFHELFEKNRKVTKKDLQEFLYLKYDIKHAELSGIEKAFNASYTTYHDFLTMSENKREMKQWLEDPELASMFEEIIKTLTVFEDREMIKTRLSHHEATLGKHIIKKLTKKHYTGWGRLSKELIQGIRDKQSNKTILDYLINDDDFPHHRNRNFMQLINDDSLSFKKEIKKAQMITDTENLEEIVKELTGSPAIKKGILQSLKIVDEIVGIMGYEPANIVVEMARENQTTGRGLKSSRPRLKALEESLKDFGSQLLKEYPTDNSSLQKDRLYLYYLQNGRDMYTGAPLDIHRLSDYDIDHIIPRSFTTDNSIDNKVLVSSKENRLKKDDVPSEKVVKKMRSFWYDLYSSKLISKRKLDNLTKIKLTEEDKAGFIKRQLVETRQITKHVAGILHHRFNKAEDTNEPIRKVRIITLKSALVSQFRNRFGIYKVREINEYHHAHDAYLNGVVALALLKKYPQLAPEFVYGEYLKFNAHKANKATVKKEFYSNIMKFFESDTPVCDENGEIFWDKSKSIAQVKKVINHHHMNIVKKTEIQKGGFSKETVEPKKDSSKLLPRKNNWDPAKYGGLGSPNVAYTVAFTYEKGKARKRTNALEGITIMEREAFEQSPVLFLKNKGYEQAEIEMKLPKYALFELENGRKRMVASNKEAQKANSFLLPEHLVTLLYHAKQYDEISHKESFDYVNEHHKEFSEVFARVLEFAGKYTLAEKNIEKLEKIYKENQTDDLAKLASSFVNLMQFNAMGAPADFKFFDVTIPRKRYTSLTEIWQSTIIHQSITGLYETRIRMGK

SEQ ID NO: 950 - protein, 1339 aa, Enterococcus faecium
MKKEYTIGLDIGTNSVGWSVLTDDYRLVSKKMKVAGNTEKSSTKKNFWGVRLFDEGQTAEARRSKRTARRRLARRRQRILELQKIFAPEILKIDEHFFARLNESFLVLDEKKQSRHPVFATIKQEKSYHQTYPTIYHLRQALADSSEKADIRLVYLAMAHLLKYRGHFLIEGELNTENSSVTETFRQFLSTYNQQFSEADDKQTEKLDEAVDCSFVFTEKMSKTKKAETLLKYFPHEKSNGYLSQFIKLMVGNQGNFKNVFGLEEAKLQFSKETYEEDLEELLEKIGDDYIDLFVQAKNVYDAVLLSEILSDSTKNTRAKLSAGMIRRYDAHKEDLVLLKRFVKENLPKKYRAFFGDNSVNGYAGYIEGHATQEDFYKFVKKELTGIRGSEVFLTKIEQENFLRKQRTFDNGVIPHQIHLTELRAIIANQKKHYPFLKEEQEKLESLLTFKIPYYVGPLAKKQENSPFAWLIRKSEEKIKPWNLPEIVDMEGSAVRFIERMINTDMYIPHNKVLPKNSLLYQKFSIYNELTKVRYQDERGQMNYFSSIEKKEIFHELFEKNRKVTKKDLQEFLYLKYDIKHAELSGIEKAFNASYTTYHDFLTMSENKREMKQWLEDPELASMFEEIIKTLTVFEDREMIKTRLSHHEATLGKHIIKKLTKKHYTGWGRLSKELIQGIRDKQSNKTILDYLINDDDFPHHRNRNFMQLINDDSLSFKKEIKKAQMITDTENLEEIVKELTGSPAIKKGILQSLKIVDEIVGIMGYEPANIVVEMARENQTTGRGLKSSRPRLKALEESLKDFGSQLLKEYPTDNSSLQKDRLYLYYLQNGRDMYTGAPLDIHRLSDYDIDHIIPRSFTTDNSIDNKVLVSSKENRLKKDDVPSEKVVKKMRSFWYDLYSSKLISKRKLDNLTKIKLTEEDKAGFIKRQLVETRQITKHVAGILHHRFNKAEDTNEPIRKVRIITLKSALVSQFRNRFGIYKVREINEYHHAHDAYLNGVVALALLKKYPQLAPEFVYGEYLKFNAHKANKATVKKEFYSNIMKFFESDTPVCDENGEIFWDKSKSIAQVKKVINHHHMNIVKKTEIQKGGFSEETVEPKKDSSKLLPRKNNWDPAKYGGLGSPNVAYTVAFTYEKGKARKRTNALEGITIMEREAFEQSPVLFLKNKGYEQAEIEMKLPKYALFELENGRKRMVASNKEAQKANSFLLPEHLVTLLYHAKQYDEISHKESFDYVNEHHKEFSEVFARVLEFAGKYTLAEKNIEKLEKIYKENQTDDLAKLASSFVNLMQFNAMGAPADFKFFDVTIPRKRYTSLTEIWQSTIIHQSITGLYETRIRMGK

SEQ ID NO: 951 - protein, 1340 aa, Enterococcus faecium
MKKEYTIGLDIGTNSVGWSVLTDDYRLVSKKMKVAGNTEKSSTKKNFWGVRLFDEGQTAEARRSKRTARRRLARRRQRILELQKIFAPEILKIDEHFFARLNESFLVLDEKKQSRHPVFATIKQEKSYHQTYPTIYHLRQALADSSEKADIRLVYLAMAHLLKYRGHFLIEGELNTENSSVTETFRQFLSTYNQQFSEADDKQTEKLDEAVDCSFVFTEKMSKTKKAETLLKYFPHEKSNGYLSQFIKLMVGNQGNFKNVFGLEEEAKLQFSKETYEEDLEELLEKIGDDYIDLFVQAKNVYDAVLLSEILSDSTKNTRAKLSAGMIRRYDAHKEDLVLLKRFVKENLPKKYRAFFGDNSVNGYAGYIEGHATQEDFYKFVKKELTGIRGSEVFLTKIEQENFLRKQRTFDNGVIPHQIHLTELRAIIANQKKHYPFLKEEQEKLESLLTFKIPYYVGPLAKKQENSPFAWLIRKSEEKIKPWNLPEIVDMEGSAVRFIERMINTDMYIPHNKVLPKNSLLYQKFSIYNELTKVRYQDERGQMNYFSSIEKKEIFHELFEKNRKVTKKDLQEFLYLKYDIKHAELSGIEKAFNASYTTYHDFLTMSENKREMKQWLEDPELASMFEEIIKTLTVFEDREMIKTRLSHHEATLGKHIIKKLTKKHYTGWGRLSKELIQGIRDKQSNKTILDYLINDDDFPHHRNRNCMQLINDDSLSFKKEIKKAQMITDTENLEEIVKELTGSPAIKKGILQSLKIVDEIVGIMGYEPANIVVEMARENQTTGRGLKSSRPRLKALEESLKDFGSQLLKEYPTDNSSLQKDRLYLYYLQNGRDMYTGAPLDIHRLSDYDIDHIIPRSFTTDNSIDNKVLVSSKENRLKKDDVPSEKVVKKMRSFWYDLYSSKLISKRKLDNLTKIKLTEEDKAGFIKRQLVETRQITKHVAGILHHRFNKAEDTNEPIRKVRIITLKSALVSQFRNRFGIYKVREINEYHHAHDAYLNGVVALALLKKYPQLAPEFVYGEYLKFNAHKANKATVKKEFYSNIMKFFESDTPVCDENGEIFWDKSKSIAQVKKVINHHHMNIVKKTEIQKGGFSKETVEPKKDSSKLLPRKNNWDPTKYGGLGSPNVAYTVAFTYEKGKARKRTNALEGITIMEREAFEQSPVLFLKNKGYEQAEIEMKLPKYALFELENGRKRMVASNKEAQKANSFLLPEHLVTLLYHAKQYDEISHKESFDYVNEHHKEFSEVFARVLEFAGKYTLAEKNIEKLEKIYKENQTDDLAKLASSFVNLMQFNAMGAPADFKFFDVTIPRKRYTSLTEIWQSTIIHQSITGLYETRIRMGK

SEQ ID NO: 952 - protein, 892 aa, Enterococcus faecium
MTFKIPYYVGPLAKKQENSPFAWLIRKSEEKIKPWNLPEIVDMEGSAVRFIERMINTDMYMPHNKVLPKNSLLYQKFSIYNELTKVRYQDERGQMNYFSSIEKKEIFHELFEKNRKVTKKDLQEFLYLKYDIKHAELSGIEKAFNASYTTYHDFLTMSENKREMEQWLEDPELASMFEEIIKTLTVFEDREMIKTRLSHHKATLGKHIIKKLTKKHYTGWGRLSKELIQGIRDKQSNKTILDYLINDDDFPHHRNRNFMQLINDDSLSFKKEIKKAQMITDTENLEEIVKELTGSPAIKKGILQSLKIVDEIVGIMGYEPANIVVEMARENQTTGRGLKSSRPRLKALEESLKDFGSQLLKEYPTDNSSLQKDRLYLYYLQNGRDMYTGAPLDIHRLSDYDIDHIIPRSFTTDNSIDNKVLVSSKENRLKKDDVPSEKVVKKMRSFWYDLYSSKLISKRKLDNLTKIKLTEEDKAGFIKRQLVETRQITKHVAGILHHRFNKAEDTNEPIRKVRIITLKSALVSQFRNRFGIYKVREINEYHHAHDAYLNGVIALALLKKYPQLAPEFVYGEYLKFNAHKANKATVKKEFYSNIMKFFESDTPVCDENGEIFWDKSKSIAQVKKVINHHHMNIVKKTEIQKGGFSKETVEPKKDSSKLLPRKNNWDPAKYGGLGSPNVAYTVAFTYEKGKARKRTNALEGITIMEREAFEQSPVLFLKNKGYEQAEIEMKLPKYALFELENGRKRMVASNKEAQKANSFLLPEHLVTLLYHAKQYDEISHKESFDYVNEHHKEFSEVFARVLEFAGKYTLAEKNIEKLEKIYKENQTDDLAKLASSFVNLMQFNAMGAPADFKFFDVTIPRKRYTSLTEIWQSTIIHQSITGLYETRIRMGK

SEQ ID NO: 953 - protein, 1336 aa, Enterococcus hirae
MTKDYTIGLDIGTNSVGWAVLTDDYQLMKRKMSVHGNTEKKKIKKNFWGARLFDEGQTAEFRRTKRTNRRRLARRKYRLSKLQDLFAEELCKQDDCFFVRLEESFLVPEEKQYKPASIFPTLEEEKEYYQKYPTIYHLRQKLVDSTEKEDLRLVYLALAHLLKYRGHFLFEGDLDTENTSIEESFRVFLEQYSKQSDQPLIVHQPVLTILTDKLSKTKKVEEILKYYPTEKINSFFAQCLKLIVGNQANFKRIFDLEAEVKLQFSKETYEEDLESLLEKIGDEYLDIFLQAKKVHDAILLSEIISSTVKHTKAKLSSGMVERYERHKADLAKFKQFVKENVPQKATVFFKDTTKNGYAGYIKGKTTQEEFYKFVKKELSGVVGSEPFLEKIDQETFLLKQRTYTNGVIPHQVHLIELKAIIDQQKQHYPFLEEAGPKIIALFKFRIPYYVGPLAKEQEASSFAWIERKTAEKINPWNFSEVVDIEKSAMRFIQRMTKQDTYLPTEKVLPKNSLLYQKYMIFNELTKVSYKDERGVKQYFSGDEKQQIFKQLFQKERGKITVKKLQNFLYTHYHIENAQIFGIEKAFNASYSTYHDFMKLAKTNQKAMQEWLEQPEMEPIFEDIVKILTIFEDRQMIKHQLSKYQEVFGEKLLKEFARKHYTGWGRFSAKLIHGIRDRKTNKTILDYLINDDDVPANRNRNLMQLINDEHLSFKEEIAKATVFSKHKSLVDVIQDLPGSPAIKKGIWQSLKIVEELIAIIGYKPKNIVIEMARENQKTHRTSPRLKALENGLKQIGSTLLKEQPTDNKALQKERLYLYYLQNGRDMYTGEPLEIENLHQYEVDHIIPRSFIVDNSIDNKVLVASKQNQKKRDDVPKKQIVNEQRIFWNQLKEAKLISPKKYAYLTKIELTPEDKARFIQRQLVETRQITKHVANILHQSFNQEEEGTDCDGVQIITLKATLTSQFRQTFGLYKVREINPHHHAHDAYLNGFIANVLLKRYPKLAPEFVYGKYVKYSLARENKATAKKEFYSNILKFLESDEPFCDENGEIYWEKSHHLPRIKKVLSSHQVNVVKKVEQQKGGFYKETVNSKEKPDKLIERKNNWDVTKYGGFGSPVIAYAIAFVYAKGKTQKKTRAIEGITIMEQAAFEKDPTTFLKEKGFPQVTEFIKLPKYTLFEFDNGRRRFLASHKESQKGNPFILSDQLVTLLYHAQHYDKITYQESFDYVNTHLSDFSAILTEVLAFAEKYTLADKNIERIQELYEENKYGETSMIAQSFLQLLQFNAIGAPADFKFFGVTIPRKRYTSLTEIWDATIIYQSVTGLYETRIRMGDLWAGEQ

SEQ ID NO: 954 - protein, 116 aa, Enterococcus sp.
MYSIGLDLGISSVGWSVIDERTGNVIDLGVRLFSAKNSEKNLERRTNRGGRRLIRRKTNRLKDAKKILAAVGFYEDKSLKNSCPYQLRVKGLTELLSKGEIYKVTLHILKNVELVT

SEQ ID NO: 955 - protein, 1391 aa, Eubacterium sp.
MENKQYYIGLDVGTNSVGWAVTDTSYNLLRAKGKDMWGARLFDEAKTAVERRTKRTSRRRSEREKARKAMLKELFADEINKVDPNFFIRLEESKFFLDDRSENNRQRYTLFNDAKFTDKDYYEKYKTIFHLRSALINSDEKFDVRLVFLAILNLFSHRGHFLNASLKGDGEIQGVDIFYNDLYEVCEEFEIDLPQISNIDNFEKILSQKGKSRTKILEELSEELSISKKEKIKYSLLKLICGMKIKVVDIYADEDIQEDDKKKDLGFRESDYEKSSLEVKEIIGDDHFELIERAKAVHDIGLLANIIGNSKYLCEARVEAYDNHHKDLQKIKELLKKYDIKAYTDMFRKMTDKNYSAYVGSVNSNIAKERRSVDNRKIEDLYEYIKKIALKNISDDNEDKIEILKKIETGEFLKKQLTASNGVIPNQLQSRELRAILKKAENYLPFLKEKGEKNLTVSEMIIQLFEFQIPYYVGPLDKNPKKDKNANSWAVIPSGGRILPWNFEDKVDVKGSRKEFIEKMVRKCTYLSEEHTLPKQSLLYEKFMVLNEINNIKIDGEKISVEAKQKIYNDLFMKGKKVSQKAIKQELISLNIMSKDSVLSGIDTVCNAYLSSIAKFRGVFDENVNNQSTIDMIEDIIFLKTVYSDEKRFVKEEIVEKYGDEIDKDKIKRILGFKFSNWGNISKSFLELEGADVGTGEIRSIIQSLWETNFNLMELLSSRFTYMDELEKRVKKLEKPLSEWTIEDLDDMYLSSPVKRMIWQSMKIVDEIQTVIGYAPKRIFVEMTRSEGEKVRTKSRKDRLKELYSAIKEDSKQWVKELDAKDESYFRSKKMYLYYLQKGRCMYSGEVIELDKLMDDNLYDIDHIYPRSFVKDDSLDNLVLVKKEINNRKQNDPITPQIQASCQGFWKVLHEQGFISNEKYSRLTRKTQEFSDEEKLSFINRQIVETGQATKCMAQILQKSMGEDVDVVFSKARLVSEFRHKFELFKSRLINDFHHANDAYLNIVVGNSYFVKFTRNPANFIKDARKNPDNPAYKYHMDRFFERDVKSKSEVAWIGQSEGNAGTIAIVKKTMSKNSPLITKKVEEGHGSITKETIVGVKEIKFGRNKVEKADKTPKKANLQAYRPIKTSDERLCNILRYGGRTSISISGYCLVEYVKKRKTIRSLEAIPVYLGRKDSLSEEKLLNYFRYNLNDGGKDSVSDIRLCLPFISTNSLVKIDGYLYYLGGKNDDRIQLYNAYQLKMKKEEVEYIRKIEKAVSMSKFDEIDREKNPVLTEEKNIELYNKIQDKFENTVFSKRMSLVKYNKKDLSFGDFLKNKKSKFEEIDLEKQCKVLYNIIFNLSNLKEVDLSDIGGSKSTGKCRCKKNITNYKEFKLIQQSITGLYSCEKDLMTI

SEQ ID NO: 956 - protein, 1391 aa, Eubacterium yurii
MENKQYYIGLDVGTNSVGWAVTDTSYNLLRAKGKDMWGARLFEKANTAAERRTKRTSRRRSEREKARKAMLKELFADEINRVDPSFFIRLEESKFFLDDRSENNRQRYTLFNDATFTDKDYYEKYKTIFHLRSALINSDEKFDVRLVFLAILNLFSHRGHFLNASLKGDGDIQGMDVFYNDLVESCEYFEIELPRITNIDNFEKILSQKGKSRTKILEELSEELSISKKDKSKYNLIKLISGLEASVVELYNIEDIQDENKKIKIGFRESDYEESSLKVKEIIGDEYFDLVERAKSVHDMGLLSNIIGNSKYLCEARVEAYENHHKDLLKIKELLKKYDKKAYNDMFRKMTDKNYSAYVGSVNSNIAKERRSVDKRKIEDLYKYIEDTALKNIPDDNKDKIEILEKIKLGEFLKKQLTASNGVIPNQLQSRELRAILKKAENYLPFLKEKGEKNLTVSEMIIQLFEFQIPYYVGPLDKNPKKDNKANSWAKIKQGGRILPWNFEDKVDVKGSRKEFIEKMVRKCTYISDEHTLPKQSLLYEKFMVLNEINNIKIDGEKISVEAKQKIYNDLFVKGKKVSQKDIKKELISLNIMDKDSVLSGTDTVCNAYLSSIGKFTGVFKEEINKQSIVDMIEDIIFLKTVYGDEKRFVKEEIVEKYGDEIDKDKIKRILGFKFSNWGNLSKSFLELEGADVGTGEVRSIIQSLWETNFNLMELLSSRFTYMDELEKRVKKLEKPLSEWTIEDLDDMYLSSPVKRMIWQSMKIVDEIQTVIGYAPKRIFVEMTRSEGEKVRTKSRKDRLKELYNGIKEDSKQWVKELDSKDESYFRSKKMYLYYLQKGRCMYSGEVIELDKLMDDNLYDIDHIYPRSFVKDDSLDNLVLVKKEINNRKQNDPITPQIQASCQGFWKILHDQGFMSNEKYSRLTRKTQEFSDEEKLSFINRQIVETGQATKCMAQILQKSMGEDVDVVFSKARLVSEFRHKFELFKSRLINDFHHANDAYLNIVVGNSYFVKFTRNPANFIKDARKNPDNPVYKYHMDRFFERDVKSKSEVAWIGQSEGNSGTIVIVKKTMAKNSPLITKKVEEGHGSITKETIVGVKEIKFGRNKVEKADKTPKKPNLQAYRPIKTSDERLCNILRYGGRTSISISGYCLVEYVKKRKTIRSLEAIPVYLGRKDSLSEEKLLNYFRYNLNDGGKDSVSDIRLCLPFISTNSLVKIDGYLYYLGGKNDDRIQLYNAYQLKMKKEEVEYIRKIEKAVSMSKFDEIDREKNPVLTEEKNIELYNKIQDKFENTVFSKRMSLVKYNKKDLSFGDFLKNKKSKFEEIDLEKQCKVLYNIIFNLSNLKEVDLSDIGGSKSTGKCRCKKNITNYKEFKLIQQSITGLYSCEKDLMTI

SEQ ID NO: 957 - protein, 1142 aa, Facklamia hominis
MYSVGLDIGIASCGYSIINDVNGNIVELGTLLFKSRNSDNNEERRTNRGSRRLINRRRTRLDDGKKLLAEKGFKQDSKLKHVCPYELRVKGLHEKLTQGEIYKVVLHILKKRGISYLDESDENSSGIDGASYKDQVNLNLNLQKELTPGQIQLKRLKENGRIKSGVTFENGYQLNVFSVSAYANELNKILTKQSEYYSEIDQIWIDRFTKNGYRKEAGLVYRKRPYYDGPGNEKNNSIYGRWANFKEDGHPKENIFDQLIGLDSVDSTQVRASASTLTAQKYNLLNDLNNLTIIEDDRKFTTDEKVSIINYLMTQDITRFGPKELAKFYQLEVDQIRGWRIDNKGNPEIHSLKVYRDWKKIFNTSSIDLTSIQTWVVDELANVITLNTEIPSTLATLKIKIPDIDQQILNFVENNFYELKKKTSKNSWHSFSLKTLNILIPELLNTSEEQNTILERLNLKFDLKNKYAEKNQIPVKELLEQIYNPTVTKSVHQSIKLFNEIIEKYGKNNISYVTIEMPRDKNDQDQKDTIKRINKLNSERKNDSEKYFLERSGWDTIRFESALKKPRFAEKLLFYYEQKGKCAYSGQDILAESLLNESCEVDHIIPLSISFDDSIHNKVLVTASSNQEKGQRTPYMAFIDGAKLGQSWDDFVAWVNSCGFHRKKVQNLLYEENIFNPDVQRGFVSRNLNDTRYASRIVLNAIQSFFYKQKDLTKVKVVNGSFTHTLRKKWGSSLDKNRDTYHHHAVDATLCAVTPFINIVKYEFFEEDGIKYMVDLTTGEKVAYSDYKKMKFYDKRAYVPIWDGFIKQLTPANLYPKIKFSHQVDSKWNRKISDATIYSTRKIVETKINKKGVAKETVKDIVIDKIKDIYTPEGWRKFKEKQDKLLMKNFDEKTYNKLIKIAKEYPEKKEVQTSNGKVSLVEVSPFKMYCEEQNVPAIRKYSKKGNGPYIRSLKFYDKELGKHINITKDSYGNDIERTIRNKKIILKNQNSWRTDVYYNSVNNCYELLGIKYCHLKFYRGKYGIPKSIYDELKKEDEISSESVFKFSLYRHDRVRFEKDGEYIEALFGSKNESNKNYLELSPIDKNKWLSKENVKFFGEVAASGRFIKGLKPGIKVIKQSTDYMGHVYAIHQEKLKFVLSDA

SEQ ID NO: 958 - protein, 1347 aa, Finegoldia magna
MKSEKKYYIGLDVGTNSVGWAVTDEFYNILRAKGKDLWGVRLFEKAKTAADTRTFRSGRRRNDRKGMRLQILREIFEDEIKKVDKDFYDRLDESKFWAEDKKVSGKYSLFNDKNFSDKQYFEKFPTIFHLRKYLMEEHGKVDIRYYFLAINQMMKRRGHFLIDGQISHVTDDKPLKEQLILLINDLLKIELEEELMDSIFEILADVNEKRTDKKNNLKELIKGQDFNKQEGNILNSIFESIVTGKAKIKNIISDEDILEKIKEDNKEDFVLTGDSYEENLQYFEEVLQENITLFNTLKSTYDFVILQSILKGKSTLSDAQVERYDEHKKDLEILKKVIKKYDEDGKLFKQVFKEDNGNGYVSYIGYYLNKNKKITAKKKISNIEFTKYVKGILEKQCDCEDEAVKYLLGKIEQENFLLKQISSINSVIPHQIHLFELDKILENLAKNYPSFNNKKEEFTKIEKIRKTFTFRIPYYVGPLNDYHKNNGGNAWIFRNKGEKIRPWNFEKIVDLHKSEEEFIKRMLNQCTYLPEETVLPKSSILYSEYMVLNELNNLRIKGKPLDTDVKLKLIEELFKKKTKVTLKSIRDYMIRNNFADKEDFDNSEKNLEIVSNMKSYIDFNNILGDKFELEMVEDLIEKITIHTGNKTLLKKYIEETYPDLSSSQIQKIINLKYKDWGRLSRKLLDGIKGRNKTDDVNTVINFMRNSSDNLMQIIEGKNYSFNEYIDNLRKKYIPQEISYEVVENLYVSPSVKKMIWQVIRVTEEITKVMGYDPDKIFIEMAKSEEEKKTTISRKNKLLDLYKAIKKDERDSQYEKLLTGLNKLDESELRSKKLYLYYTQMGRDMYTGEKIDLDKLFDSTHYDKDHIIPQSMKKDDSIINNLVLVNKNANQTTKGNIYPVPSSIRNNPDIYNYWKYLMEKEFISKEKYNRLIRNTPLTNEELGVFINRQLVETRQSTKAIKELFEKFYQKSKIIPVKASLASDLRKDMNTLKSREVNDLHHAHDAFLNIVAGDVWNREFTSNPINYVNENREGDKVKYSLSKYFTRPRKSKGKVIWTPEKGRKLIVDTLNKPSVLISNESHVKKGELFNATISGKKDYKKGKIYLPLKKDDRLKDVSKYGGYKAINGAFFFLVEHTKSKKRIRSIELFPLHLLSKFYEDKNTVLDYAINVLQLQDPKIIIDKINYRTEIIIDNFSYLISTKSNDGSITVKPNEQMYWRVDEISNLKKIENKYKKDAILTEEDRKIMESYIDKIYQQFKAGKYKNRRTTDTIIEKYEIIDLDTLDNKQLYQLLVAFISLSYKTSNNAVDFTVIGLGTECGKPRITNLPDNTYLVYKSITGIYEKRIRIK

SEQ ID NO: 959 - protein, 1348 aa, Finegoldia magna; identical to SEQ ID NO: 222

SEQ ID NO: 960 - protein, 1516 aa, Flavobacteriaceae bacterium
MLKQQKDKIIGMNKKILGLDLGTNSIGWALVKQDLENKYGEIIGCGSRIIPMSQDVLGKFDAGISISQTAERTNYRSVRKLIQRNTLRRERLHRVLHQLDFLPKHYNDSIDFEKKLGQFKTDKETKLNYFVNQHGKHEFLFKDSFNEMVKEFKEEQPELFYIKNNGKETKIPYDWTIYYLRKKALSKKISKEELSWLVLNFNQKRGYYQLRGEIDEEKEKNKRYEKLYVSEVVKTNNTIKKTGEYLYDIYFDNGWKYEKQTTKPQDWLHKHKEFIITTTTLKNGETKRTFKTVDSEKDWIAIKSKTEQDIKESNKTVGAFIYDTLLKNPTQKIRGSLVKTIERKFYREEFEKILKEQIKHRPEINVNTAIGKENYTKCVTELYPRNEAHANNILTNDFNYLFTKDILFYQRPLKSKKSEIANCQYEYRTYIKKKEKTGKEERVKQPLKATPKSHPLFQEFRLWQFIHNLKIYIRETTVGNKPLFDVDITDTFFTSENDWATLFEYLNNKKEIEQKHVLEYLVSKKIISKSEKTDYRWNYVEDKKYPGNETRVDFINRLKKVENLNVDEFLTSELEFKLWHIIYSVTDKNEYEKALENFAIRQNIDKDSFVNSFKKFPPFKSDYGAYSTKAIKKLLPLMRLGKFWDGSEIPKVVVEKITDIKTRLTSVNYDESLFKKDEKKILETIVDDITPKQLLKSFVKLKGKNHLAGLNTYQACYLVYERHSESSDITQWENPDDIDSFLNHFKQHSLRNPIVEQVVTETLRTVRDIWKYYGNGSPNYFNEIHIELGREMKNPADKRKQMSAKINENENTNQRIKGILQELMNDGVQDIKPYSPSQQEILKIYEEGISQNPNVDYSKVSEDEITKIKKSNNPTLKEIQRYKLWLEQKYISPYTGKPIPLSELFTPAYQIEHIIPQSRYFDNSLSNKIICESEVNEDKSNKTAYEYLKTNGGSIVHGHHLLSLKEYEDHCQHYFKKNRTKLKNLLSEEIPEGFINRQLNDSRYISKLIKGLLSNIVREENEQEATSKNIVPVTGSITSKLKQDWGLNDKWNEIIAPRFKRLNKMTNSNDFGYFDEKINTFRIQVPDAISRGFNKKRIDHRHHTLDALVIACCTKKHIQYLNSLNNEIIKHELKPSILIKNAQGDYTKHFMLPWNNFPIDCKNAIENTIVSFKQNLRVINKTSNKYQSYKDENGNLRLGKDGKPKKGLTKQTKGNNWAVRKAMHEDTFYGEIVDGENKGKLKIKTLLDTSFDVKKIEDKVLDKSIRTILINYLKQDKYKNLSKPHEEAFSPNGIIEMNKNIISLNNNIPHKPIKRVTLKHEKGKKFSIKTLLDKKTKFAKSATGTNVFFCIYKNINGKIKYHTPSFEEIIEIQKQEFEIKYKSKLNVPETLFDKKESFELLFYLQPNDLVYLPNDEELKNRQLIDFNNLNKKQIKRIYKFTDGSGTTANFIPYQVAKVIFNLNKKEQAKSSFKYPIQNEFGVGSPQSKNQKSIEGILIKERCIKLKIDRLGNISKA

SEQ ID NO: 961 - protein, 1629 aa, Francisella cf.
MNFKILPIAIDLGVKNTGVFSAFYQKGTSLERLDNKNGKVYELSKDSYTLLMNNRTARRHQRRGIDRKQLVKRLFKLIWTEQLNLEWDKDTQQAISFLFNRRGFSFITDGYSPEYLNIVPEQVKAILMDIFDDYNGEDDLDSYLKLATEQESKISEIYNKLMQKILEFKLRKLCTDIKDDKVSTKTLKEITSYEFELLADYLANYSEILKTQKFSYTDKQGNLKELSYYHHDKYNIQEFLKRHATINIQILDTLLTDDLDIWNFNFEKFDFDKNEEKLQNQEDKDHIQAHLHHFVFAVNKIKSEMASGGRHRSQYFQEITNVLDENNHQEGYLKNFCENLHNKKYSNLSVKNLVNLIGNLSNLELKPLRKYFNDKIHAKADHWDEQKFTETYCHWILGEWRVGVKDQDKKDGAKYSYKDLCNELKQKVTKAGLVDFLLELDPCRTIPPYLDNNNRKPPKCQSLILNPKFLDNQYPNWQQYLQELKKLQSIQNYLESFETDLKVLKSSKDQPYFVEYRSSNQQIASGQRDYKDLDARILQFIFDRVKASDELLLNEIYFQAKKLKQKASSELEKLESSKKLDEVIANSQLSQILKSQHTNGIFEQGTFLHLVCKYYKQRQRARDSRLYIMPEYRYDKKLHKYNNTGRFDDDNQLLTYCNHKPRQKRYQLLNDLAGVLQVSPNFLKDKIGSDDDLFISKWLVEHIRGFKKACEDSLKIQKDNRGLLNHKINIARNTKGKCEKEIFNLICKIEGSEDKKGNYKHGLAYELGVLLFGEPNEASKPEFDRKIKKFNSIYSFAQIQQIAFAERKGNANTCAVCSADNAHRMQQIKITEPVEDNKDKIILSAKAQRLPAITTRIVDGAVKKMATILAKNIVDDNWQNIKQVLSAKHQLHIPIITESNAFEFEPALADVKGKSLKDRRKKALERISPENIFKDKNNRIKEFAKGISAYSGANLTDGDFDGAKEELDHIIPRSHKKYGTLNDEANLICVTRGDNKNKGNRIFCLRDLANNYKLKQFETTDDLEIEKKIADTIWDANKKDFKFGNYRSFINLTPQEQKAFRHALFLADENPIKQAVIRAINNRNRTFVNGTQRYFAEVLANNIYLRAKKENLNTDKISFDYFGIPTIGNGRGIAEIRQLYEKVDSDIQAYAKGDKPQASYSHLIDAMLAFCIAADEHRNDGSIGLEIDKNYSLYPLDKNTGEVFTKDIFSQIKITDNEFSDKKLVRKKATEGFNTHRQMTRDGIYAENYLPILIHKELDEVRKGYTWKNSEEIKIFKGKKYDIQQLNNLLYCLKFVDKPISIDIQISTLEELRNILTTNNIAATAEYYYINLKTQKLHEYYIENYNTALGYKKYTKEMEFLRSLAYRSERVKIKSIDDVKQVLDKDSNFIIGKITLPFKKEWQRLYREWQNITIKDDYEFLKSFFNVKSITKLHKKVRKDFSLPISTNEGKFLVKRKTWDNNFIYQILNDSDSRVDGTKPFIPAFDISKNEIVEAIIDSFTSKNIFWLPKNIELQKVDNKNIFAIDTSKWFEVETPSDLRDIGVATIQYKIDNNSRPKVRVKLDYVIDDDSKINYFTNHSLLKSRYPDKVLEILKQSTIIEFESSGFNKTIKEMLGMTLAGIYNETSNN

SEQ ID NO: 962 - protein, 1646 aa, Francisella cf.
MNIKILPIAIDLGAKNTGVFSAFYQKGTSLESLDNKNGKVYELSKDSYTLLMNNRTARRHQRRGIDRKQLVKRLFKLIWTKQLNLEWNKDTQQTISFLLNRRGFSFITDGYSPEYLNIAPEAVKAILMSILDDYNGEDDLDSYLQSATENDSKIDELYNKLLQKALEFKLRKLCIDIKEDKVTTKTLKELSNTEFKLLANYLVDYDRILRTQKFSYTDKQGNLRELNYYHHDKYNIQEFLKRNIIINDVILEKLTDDLDIWNLNFDKFDFEKNLEKLENQEDKDYLQTHLHHFVFAVNKIKSEMASGGRHRSQYFQEITNVLVENNHQEGYLKNFCENLHNKKYSNLSVKNLVNLIGNLSNLELKPLRKYFNDKIHAKADYWDEQKFAETYSDWILGEWRVGAKDKDKKDGAKYSYKNLCDELKQKVGINQDGIINQTKSDFVDFLLELDPCRTIPPYLDNNNRKPPKCQSLILNPKFLDNKYPNWQQYLQELKKLQTVQNYLGNFEIDLKDLKSSKEQPYFVKYKSLNQQIASGQRDYKDLDARVLQFIFDRVKASDELLLNEIYSHAKKLKQNTSSELEKLELCKKLDEVIANSQLSQILKSQHVNGIFEQGTFLHLVCKYYKQRQRARDSRLYIMPEYRYDKKLDKYNNTGRFDDDNQLLTYCNHKPRQKRYQLLNDLAGVLQVSPNFLKDKIGSDDDLFISKWLVEHIRGFKKACEDSLKIQKDNRGLLNHKINIARNTKGKCEKEIFNLICKIEGSEDKKGNYKHGLAYELGVLLFGEPNQASKLEFDRKIKKFNSIYSFAQIQQIAFAERKGNANTCAVCSADNAHRMQQIKVAKPVEGNKDNIILSAKAQRLPAIPTRIVDGAVKKIATILARNIVDDNWDNIKQALSNNQQLHVPIITESNAFEFEPALADIKGKSLKDKRKKALERIDPENVFKDKNNRIKEFAKGISAYSDANLANGDFDGAKEELDHIIPRSHKKYGTLNDEANLICVTREDNQNRGNKAVFLYDLKPNYKLKQFNTTDDLEIEKKIADTIWDASKQDFKFGNYRSFINLTPQEQIAFRHALFLADKNPIKKAVIRAIDNRNRTFVNGTQRYFAEVLANNIYLRAKKENLATNRITFDYFGIETTNSNGRGIADVRKLYEKVDSDIQAYAKGDKPQDSYSHLIDAMIAFCVAADEHKNEGSIGLKMGNQYGLFPTPDKYDENTGEIISWHNDDIFRKIKVSDNQFSDKKLVRKKATEGFNTHRQMTRDGIYGESYLPILIHKNLNEVRKGYNWENSEEIKIFKGKKYDIQQLNNLVYCLKFVDKPISIDIQITTLEELRNILETNNISTTAEYYYINLKTQKLHEYYIENYNTALGYKKYTKEMEFLRSLAYRTERVKIKSIDDVSMILAKDSNFKAGKIELPFKTEWQRLYLEWQNTTIKDNHEFLKSYFSVKNATKQHKKVRKDFSLPISTNEGKLLVKRKTWDNNFIYQILNDSDSRADGTKPFIPAFDISKNEIVETIIKSFTSKNIFWLPKNIELQKVDNKSIFAIDTSRWFEVETPKDLIEIGVSTIQYKIDNNSRPKVRVKLDYVMDDDSKINYFMNHSLLKSRYPDKVLEILKQSTIIEFESSGFNKTIKEMLGMTLAGIYNETSNN

SEQ ID NO: 963 - protein, 1629 aa, Francisella novicida
MNFKILPIAIDLGVKNTGVFSAFYQKGTSLERLDNKNGKVYELSKDSYTLLMNNRTARRHQRRGIDRKQLVKKLFKLIWTEQLNLEWDKDTQQAISFLFNRRGFSFITDGYSPEYLNIVPEQVKAILMDIFDDYNGEDDLDSYLKLATEQESKISEIYNKLMQKILEFKLRKLCTDIKDDKVSTKTLKEITSYEFELLADYLANYSESLKTQKFSYTDKQGNLKELSYYHHDKYNIQEFLKRHATINDEILDTLLTDDLDIWNFNFEKFDFDKNEEKLQNQEDKDHTQAHLHHFVFAVNKIKSEMASGGRHRGQYFQEITNVLDENNHQEGYLKNFCENLHNKKYSNLSVKNLVNLIGNLSNLELKPLRKYFNDKIHAKADHWDEQKFTETYCHWILGEWRVGLKDQDKKEGAKYSYKDLCNELKQKVTNAGLIDFLLELDPCRTIPPYLDNNNRKPPKCQSLILNPKFLDNQYPNWQQYLQELKKLQIIQDYLESFETDLKVLKSSKDQPYFVEYKSSNQQIASGQRDYKDLDARILQFIFDRVKASDELLLNEIYFQAKKLKQKASSELEKLESSKKLDEVIANSQLSKILKSQHTNGIFEQGTFLHLVCKYYKQRQRARDSRLYIMPEYRYDKKLDKYNNTGRFDDDNQLLTYCNHKPRQKRYQLLNDLAGVLQVSPNFLKDKIGSDDDLFISKWLVEHIRGFKKACEDSLKIQKDNRGLLNHKINIARNTKGKCEKEIFNLICKIEGSEDKKGNYKHGLAYELGVLLFGEPNEASKPEFDRKIKKFNSIYSFAQIQQIAFAERKGNANTCAVCSADNAHRMQQIKITEPVEDNKDKIILSAKAQRLPAIPTRIVDGAVKKMATILAKNIVDDNWQNIKQVLSAKHQLHIPIITESNAFEFEPALADVKGKSLKDRRKKALERISPENIFKDKNNRIKEFAKGISAYSGANLTDGDFDGAKEELDHIIPRSHKKYGTLNDEANLICVTRDDNKNKGNRIFCLHDLANNYKLKQFETTDDLEIEKKIADTIWDASKKDFKFGNYRSFINLTPQEQKAFRHALFLADENPIKQAVIRAINNRNRTFVNGTQRYFAEVLANNIYLRAKKENLNTDKISFDYFGIPTIGNGRGIAEIRQLYEKVDSDIQVYAKGDKPQASYSHLIDAMLAFCIAADEHRNDGSIGLEIDKNYSLYPLDKNTGEVFTKDIFSQIKITDNEFSDKKLVRKKATEGFNTHRQMTRDGIYAENYLPILIHKELDEVRKGYTWKNSEEIKIFKGKKYDIQQLNNLLYCLKFVDKPISIDIQISTLEELRNILTTNNIAATAEYYYINLKTQKLHEYYIENYNTALGYKKYTKEMEFLRSLAYRSERVKIKSIDDVKQVLDKDSNFIIGKITLPFKKEWQRLYREWQNTTIKDDYEFLKSFFNVKSITKLHKKVRKDFSLPISTNEGKFLVKRKTWDNNFIYQILNDSDSRVDGTKPFIPAFDISKNEIVEAIIDSFTSKNIFWLPKNIELQKVDNKNIFAIDTSKWFEVETPSDLRDIGVATIQYKIDNNSRPKVRVKLDYVIDDDSKINYFTNHSLLKSRYPDKVLEILKQSTIIEFESSGFNKTIKEMLGMTLAGIYNETSNN

SEQ ID NO: 964 - protein, 1629 aa, Francisella novicida
MNFKILPIAIDLGVKNTGVFSAFYQKGTSLERLDNKNGKVYELSKDSYTLLMNNRTARRHQRRGIDRKQLVKRLFKLIWTEQLNLEWDKDTQQAISFLFNRRGFSFITDGYSPEYLNIVPEQVKAILMDIFDDYNGEDDLDSYLKLATEQESKISEIYNKLMQKILEFKLMKLCTDIKDDKVSTKTLKEITSYEFELLADYLANYSESLKTQKFSYTDKQGNLKELSYYHHDKYNIQEFLKRHATINDRILDTLLTDDLDIWNFNFEKFDFDKNEEKLQNQEDKDHIQAHLHHFVFAVNKIKSEMASGGRHRSQYFQEITNVLDENNHQEGYLKNFCENLHNKKYSNLSVKNLVNLIGNLSNLELKPLRKYFNDKIHAKADHWDEQKFTETYCHWILGEWRVGVKDQDKKDGAKYSYKDLCNELKQKVTKAGLVDFLLELDPCRTIPPYLDNNNRKPPKCQSLILNPKFLDNQYPNWQQYLQELKKLQSIQNYLDSFETDLKVLKSSKDQPYFVEYKSSNQQIASGQRDYKDLDARILQFIFDRVKASDELLLNEIYFQAKKLKQKASSELEKLESSKKLDEVIANSQLSQILKSQHTNGIFEQGTFLHLVCKYYKQRQRARDSRLYIMPEYRYDKKLHKYNNTGRFDDDNQLLTYCNHKPRQKRYQLLNDLAGVLQVSPNFLKDKIGSDDDLFISKWLVEHIRGFKKACEDSLKIQKDNRGLLNHKINIARNTKGKCEKEIFNLICKIEGSEDKKGNYKHGLAYELGVLLFGEPNEASKPEFDRKIKKFNSIYSFAQIQQIAFAERKGNANTCAVCSADNAHRMQQIKITEPVEDNKDKIILSAKAQRLPAIPTRIVDGAVKKMATILAKNIVDDNWQNIKQVLSAKHQLHIPIITESNAFEFEPALADVKGKSLKDRRKKALERISPENIFKDKNNRIKEFAKGISAYSGANLTDGDFDGAKEELDHIIPRSHKKYGTLNDEANLICVTRGDNKNKGNRIFCLRDLADNYKLKQFETTDDLEIEKKIADTIWDANKKDFKFGNYRSFINLTPQEQKAFRHALFLADENPIKQAVIRAINNRNRTFVNGTQRYFAEVLANNIYLRAKKENLNTDKISFDYFGIPTIGNGRGIAEIRQLYEKVDSDIQAYAKGDKPQASYSHLIDAMLAFCIAADEHRNDGSIGLEIDKNYSLYPLDKNTGEVFTKDIFSQIKITDNEFSDKKLVRKKAIEGFNTHRQMTRDGIYAENYLPILIHKELNEVRKGYTWKNSEEIKIFKGKKYDIQQLNNLVYCLKFVDKPISIDIQISTLEELRNILTTNNIAATAEYYYINLKTQKLHEYYIENYNTALGYKKYSKEMEFLRSLAYRSERVKIKSIDDVKQVLDKDSNFIIGKITLPFKKEWQRLYREWQNTTIKDDYEFLKSFFNVKSITKLHKKVRKDFSLPISTNEGKFLVKRKTWDNNFIYQILNDSDSRVDGTKPFIPAFDISKNEIVEAIIDSFTSKNIFWLPKNIELQKVDNKNIFAIDTSKWFEVETPSDLRDIGVATIQYKIDNNSRPKVRVKLDYVIDDDSKINYFTNHSLLKSRYPDKVLEILKQSTTIEFESSGFNKTIKEMLGMTLAGIYNETSNN

SEQ ID NO: 965 - protein, 244 aa, Francisella tularensis
ARKQNSEIYNKLMQKILEFKLRKLCTDIKDDKVSTKTLKEITSYEFELLADYLANYSESLKTQKFSYTDKQGNLKELSYYHHDKYNIQEFLKRHATINDEILDTLLTDDFDIWNFNFEKFDFDKNEEKLQNQEDKDHTQAYLHHFVFAVNKIKSEMASGGRHRSQYFQEITNVLDENNHQEGYLKNFCENLHNKKYSNLSVKNLVNLVGNLSNLELKPLRKYFNDKNLIIGMSKSLQKLIATGY

SEQ ID NO: 966 - protein, 501 aa, Francisella tularensis
MEIEKKIADTIWDASKQDFKFGNYRSFINLTPQEQKAFRYALFLADENSIKQAVIRAINNRNRTFVNGTQRYFAEVLANNIYLRAKKENLNTDKISFDYFGIPTIGNGRGIADIRQLYEKVDSDIQAYAKGDKPQASYSHLIDAMIAFCVAADEHRNDGSIGLEIDKNYSLYLLDKNTGEVFTKDIFSQIKITDNEFSDKKLVRKKATEGFNTHRQMTRDGIYAENYLPILIHKELDEVRKGYTWGNSEELKIHKGKKYNIQQLNNIVYCLKFIDKSISIDIQISTLEELRNILTTNNIAATAEYYYINLKNQKLHEYYIENYNTALDYKKYSKEMEFLRSLAYRSERVKIKSIDDVKQVLDKDSNFIIGKITLPFKKEWQRLYLEWQNTTIKDDYEFLKSFFNVKSITKLHKKVRKDFSLPISTNEGKFLVKRKTWDNNFIYQILNDSDSRVDGTKPFIPAFDISKNEIVEAIIDSFTSKNIFWLPKNIELQNVDKIFLL

SEQ ID NO: 967 - protein, 158 aa, Francisella tularensis
MIDFLLELDPCITIPPYLDNNNRKPPKCQSLILNPKFLDNQYPNWQQYLQELKKLQSIQDYLDSFETDLKDLKSSKDQPYFVEYKSSNQQMASGQRDYKDLDARILQFIFDRVKASDELLLNEIYFQAKKLKQKASSELEKLESSKKLDEVIANSQLS

SEQ ID NO: 968 - protein, 878 aa, Francisella tularensis
MLNDLAGVLQVSRNQLLSSVEEWFQQAQRVGEISKSQDEQIFEWLKSFKIASYCKAAVEMQKQYRGTLKNAIQTAIFRQSENINKNKNKNKNTGNQQQALSENSKDVKSLTADEKKLLKLIENIAKASQKIGESLGLNDKQIKKFNSIYNFAQIQQIAFAERKGNANTCAVYSADNAHRMQQIKITELVEDNKDNIILSAKAQRLPAIPTRIVDGAVKKMATILAKNIVDDNWQNIKQVLSAKHQLHIPIITESNAFEFEPALADVKGKSLKDRRKKALERISPENIFKDKNNRIKEFAKGISAYSGANLTDGDFDGAKEELDHIIPRSYKKYGTLNDEVNLICVTRDDNKNKGKRIFCLNDLANNYKLKQFETTDDLEIEKKIADTIWDASKQDFKFGNYRSFINLIPQEQKAFRYALFLADENSIKQAVIRAINNRNRTFVNGTQRYFAEVLANNIYLRAKKENLNTDKISFDYFGIPTIGNGRGIADIRQLYEKVDSDIQAYAKGDKPQASYSHLIDAMIAFCVAADEHRNDGSIGLEIDKNYSLYPLDKNTGEVFTKDIFSQIKITDNEFSDKKLVRKKATEGFNTHRQMTRDGIYAENYLPILIHKELDEVRKGYTWGNSEELKIHKGKKYNIQQLNNIVYCLKFIDKSISIDIQISTLEELRNILTTNNIAATAEYYYINLKNQKLHEYYIENYNTALDYKKYSKEMEFLRSLAYRSERVKIKSIDDVKQVLDKDSNFIIGKITLPFKKEWQRLYLEWQNTTIKDDYEFLKSFFNVKSINKLHKKVRKDFSLPISTNEGKFLVKRKTWDNNFIYQILNDSDSRVDGTKPFIPAFDISKNEIVEAIIDSFTSKNIFWLPKNIELQKVDKIFLL

SEQ ID NO: 969 - protein, 292 aa, Francisella tularensis
MLNDLAGVLQVSRNQLLSSVEEWFQQAQRVGEISKSQDEQIFEWLKSFKIASYCKAAVEMQKQYRGTLKNAIQTAIFRQSENINKNKNKNTGNQQQALSENSKDVKSLTADEKKLLKLIENIAKASQKIGESLGLNDKQIKKFNSIYNFAQIQQIAFAERKGNANTCAVYSADNAHRMQQIKITELVEDNKDNIILSAKAQRLPAIPTRIVDGAVKKMVTILAKNIVDDNWQNIKQVLSAKHQLHIPIITESNAFEFEPALADVKGKSLKDRRKKALERISPENIFKDKNIC

SEQ ID NO: 970 - protein, 53 aa, Francisella tularensis
MNHSLLKSRYPDKVLEILKQSTIIEFESSGFNKTIKEMLGMTLAGIYNETSNN

SEQ ID NO: 971 - protein, 393 aa, Francisella tularensis
MNVKILPIAIDLDVKNTGVFSAFYQKGTSLEKLDNKNGKVYELSKDSYTLLMNNRTAQRHQRRGIDRKQLVKRLFKLVWTEQLNLEWDKDTQQAISFLFNRRGFSFITDGYSTEYLNIVPEQVKAILMDIFDDYNGEDDLDSYLKLATEQESKISEIYNKLMQKILEFKLRKLCTDIKDDKVSTKTLKEITSYEFELLADYLANYSESLKTQKFSYTDKQGNLKELSYYHHDKYNIQEFLKRHATINDEILDTLLTDDFDIWNFNFEKFDFDKNEEKLQNQEDKDHTQAYLHHFVFAVNKIKSEMASGGRHRSQYFQEITNVLDENNHQEGYLKNFCENLHNKKYSNLSVKNLVNLVGNLSNLELKPLRKYFNDKNLIIGMSKSLQKLIATGY

SEQ ID NO: 972 - protein, 1629 aa, Francisella tularensis
MNVKILPIAIDLGVKNTGVFSAFYQKGTSLERLDNKNGKVYELSKDSYTLLMNNRTARRHQRRGIDRKQLVKRLFKLIWTEQLNLEWDKDTQQAISFLFNRRGFSFITDGYSPEYLNIVPEQVKAILMDIFDDYNGEDDLDSYLKLATEQESKISEIYNKLMQKILEFKLRKLCTDIKDDKVSTKTLKEITSYEFELLADYLANYSEILKTQKFSYTDKQGNLKELSYYHHDKYNIQEFLKRHATINDEILDTLLTDDLDIWNFNFEKFDFDKNEEKLQNQEDKDHTQAHLHHFVFAVNKIKSEMASGGRHRGQYFQEITNVLDENNHQEGYLKNFCENLHNKKYSNLSVKNLVNLIGNLSNLELKPLRKYFNDKIHAKADHWDEQKFTETYCHWILGEWRVGVKDQDKKDGAKYSYKDLCNELKQKVTKAGLVDFLLELDPCRTIPPYLDNNNRKPPKCQSLILNPKFLDNQYPNWQQYLQELKKLQSIQNYLESFETDLKVLKSSKDQPYFVEYKSSNQQIASGQRDYKDLDARILQFIFDRVKASDELLLNEIYFQAKKLKQKASSELEKLESSKKLDEVIANSQLSQILKSQHTNGIFEQGTFLHLVCKYYKQRQRARDSRLYIMPEYRYDKKLDKYNNTGRFDDDNQLLTYCNHKPRQKRYQLLNDLAGVLQVSPNFLKDKIGSDDDLFISKWLVEHIRGFKKACEDSLKIQKDNRGLLNHKINIARNTKGKCEKEIFNLICKIEGSEDKKGNYKHGLAYELGVLLFGEPNEASKPEFDRKIKKFNSIYSFAQIQQIAFAERKGNANTCAVCSADNAHRMQQIKITEPVEDNKDKIILSAKAQRLPAIPTRIVDGAVKKMATILAKNIVDDNWQNIKQVLSAKHQLHIPIITESNAFEFEPALADVKGKSIKDRRKKALERISPENIFKDKNNRIKEFAKGISAYSGDNLASGDFDGAKEELDHIIPRSHKKYGTLNDEANLICVTRDDNKNKGNRIFCLHDLANNYKLKQFETTDDLEIEKKIADTIWDASKKDFKFGNYRSFINLTPQEQKAFRHALFLADENPIKQAVIRAINNRNRTFVNGTQRYFAEVLANNIYLRAKKENLNTDKISFDYFGIPTIGNGRGIVEIRQLYEKVDSDIQAYAKGDKPQASYSHLIDAMLAFCIAADEHRNDGSIGLEIDKNYSLYPLDKNTGEVFTKDIFSQIKITNNEFSDKKLVRKKATEGFNTHRQMTRDGIYAENYLPILIHKELDEVRKGYTWGNSEELKIHKGKKYDIQQLNNLVYCLKFIDKSISIDIQISTLEELRNILTTNNIATTAEYYYINLKTQKLHEYYIENYNTALGYKKYTKEMEFLRSLAYRSERVKIKSIDDVKQVLDKDSNFIIGKITLPFKKEWQRLYREWQNTTIKDDYEFLKSFFNVKSITKLHKKVRKDFSLPISTNEGKFLVKRKTWDNNFIYQILNDSDSRVDGTKPFIPAFDISKNEIVEAIIDSFTSKNIFWLPKNIELQKVDNKNIFAIDTSKWFEVETPSDLRDIGVATIQYKIDNNSRPKVRVKLDYVIDDDSKINYFTNHSLLKSRYPDKVLEILKQSTIIEFESSGFNKTIKEMLGMTLAGIYNETSNN

SEQ ID NO: 973 - protein, 285 aa, Francisella tularensis
MTRDGIYAENYLPILIHKELDEVRKGYTWGNSEELKIHKGKKYNIQQLNNIVYCLKFIDKSISIDIQISTLEELRNILTTNNIAATAEYYYINLKNQKLHEYYIENYNTALDYKKYSKEMEFLRSLAYRSERVKIKSIDDVKQVLDKDSNFIIGKITLPFKKEWQRLYLEWQNTTIKDDYEFLKSFFNVKSITKLHKKVRKDFSLPISTNEGKFLVKRKTWDNNFIYQILNDSDSRVDGTKPFIPAFDISKNEIVEAIIDSFTSKNIFWLPKNIELQKVDKIFLL

SEQ ID NO: 974 - protein, 1323 aa, Fructobacillus fructosus
MVYDVGLDIGTGSVGWVALDENGKLARAKGKNLVGVRLFDTAQTAADRRGFRTTRRRLSRRKWRLRLLDELFSAEINEIDSSFFQRLKYSYVHPKDEENKAHYYGGYLFPTEEETKKFHRSYPTIYHLRQELMAQPNKRFDIREIYLAIHHLVKYRGHFLSSQEKITIGSTYNPEDLANAIEVYADEKGLSWELNNPEQLTEIISGEAGYGLNKSMKADEALKLFEFDNNQDKVAIKTLLAGLTGNQIDFAKLFGKDISDKDEAKLWKLKLDDEALEEKSQTILSQLTDEEIELFHAVVQAYDGFVLIGLLNGADSVSAAMVQLYDQHREDRKLLKSLAQKAGLKHKRFSEIYEQLALATDEATIKNGISTARELVEESNLSKEVKEDTLRRLDENEFLPKQRTKANSVIPHQLHLAELQKILQNQGQYYPFLLDTFEKEDGQDNKIEELLRFRIPYYVGPLVTKKDVEHAGGDADNHWVERNEGFEKSRVTPWNFDKVFNRDKAARDFIERLTGNDTYLIGEKTLPQNSLRYQLFTVLNELNNVRVNGKKFDSKTKADLINDLFKARKTVSLSALKDYLKAQGKGDVTITGLADESKFNSSLSSYNDLKKTFDAEYLENEDNQETLEKIIEIQTVFEDSKIASRELSKLPLDDDQVKKLSQTHYTGWGRLSEKLLDSKIIDERGQKVSILDKLKSTSQNFMSIINNDKYGVQAWITEQNTGSSKLTFDEKVNELTTSPANKRGIKQSFAVLNDIKKAMKEEPRRVYLEFAREDQTSVRSVPRYNQLKEKYQSKSLSEEAKVLKKTLDGNKNKMSDDRYFLYFQQQGKDMYTGRPINFERLSQDYDIDHIIPQAFTKDDSLDNRVLVSRPENARKSDSFAYTDEVQKQDGSLWTSLLKSGFINRKKYERLTKAGKYLDGQKTGFIARQLVETRQIIKNVASLIEGEYENSKAVAIRSEITADMRLLVGIKKHREINSFHHAFDALLITAAGQYMQNRYPDRDSTNVYNEFDRYTNDYLKNLRQLSSRDEVRRLKSFGFVVGTMRKGNEDWSEENTSYLRKVMMFKNILTTKKTEKDRGPLNKETIFSPKSGKKLIPLNSKRSDTALYGGYSNVYSAYMTLVRANGKNLLIKIPISIANQIEVGNLKINDYIVNNPAIKKFEKILISKLPLGQLVNEDGNLIYLASNEYRHNAKQLWLSTTDADKIASISENSSDEELLEAYDILTSENVKNRFPFFKKDIDKLSQVRDEFLDSDKRIAVIQTILRGLQIDAAYQAPVKIISKKVSDWHKLQQSGGIKLSDNSEMIYQSATGIFETRVKISDLL

SEQ ID NO: 975 - protein, 1367 aa, Fusobacterium sp.
MKKQKFSDYYLGFDIGTNSVGWCVTDLDYNVLRFNKKDMWGSRLFDEAKTAAERRVQRNSRRRLKRRKWRLNLLEEIFSDEIMKIDSNFFRRLKESSLWLEDKNSKEKFTLFNDDNYKDYDFYKQYPTIFHLRDELIKNPEKKDIRLIYLALHSIFKSRGHFLFEGQNLKEIKNFETLYNNLISFLEDNGINKSIDKDNIKKLEKIICDSGKGLKDKEKEFKEIFNSDKQLVAIFKLSVGSSVSLNDLFDTDEYKKEEVEKEKISFREQIYEDDKPIYYSILGEKIELLDIAKSFYDFMVLNNILSDSNYISEAKVKLYEEHKKDLKNLKYIIRKYNKENYDKLFKDKNENNYPAYIGLNKEKGKKEVVEKSGLKIDDLIKVIKGYLPKPERIEEKDKTIFNEILNKIELKTILPKQRISDNGTLPYQIHEVELEKILENQSKYYDFLNYEENGVSTKDKLLKTFKFRIPYYVGPLNSYHKDKGGNSWIVRKEEGKILPWNFEQKVDIEKSAEEFIKRMTNKCTYLNGEDVIPKDSFLYSEYIILNELNKVQVNDEFLNEENKRKIIDELFKENKKVSEKKFKEYLLVNQIANRTVELKGIKDSFNSNYVSYIKFKDIFGEKLNLDIYKEISEKSILWKCLYGDDKKIFEKKIKNEYGDILNKDEIKKINSFKFNTWGRLSEKLLTGIEFINLETGECYSSVMEALRRTNYNLMELLSSKFTLQESIDNGNKEMNEVSYRDLIEESYVSPSLKRAILQTLKIYEEIKKITGRVPKKVFIEMARGGDETMKNKKIPARQEQLKKLYDSCGNDIANFSIDIKKMKSSLSSYDNNSLRQKKLYLYYLQFGKCMYTGREIDLDRLLQNNDTYDIDHIYPRSKVIKDDSFDNLVLVLKNENAEKSNEYPVKKEIQEKMKSFWRFLKEKNFISDEKYKRLTGKDDFELRGFMARQLVNVRQTTKEVGKILQQIEPEIKIVYSKAEIASSFREMFDFIKVRELNDTHHAKDAYLNIVAGNVYNTKFTEKPYRYLQEIKENYDVKKIYNYDIKNAWDKENSLEIVKKNMKKNTVNITRFIKEEKGQLFDLNPIKKGETSNEIISIKPKLYNGKEEKLNEKYGYYKSLNPAYFLYVEHKEKNKRIKSFERVNLVDVNNIKDEKSLVKYLIENKKLVEPRLIKKVYKRQVILINDYPYSIVALDSNKLMDFENLKPLFLENKYEKILKNVIKFLEDNQGKSEENYKFIYLKKKDRYEKNETLESVKDRYNLEFNEMYDKFLEKLDSKDYKNYINNKKYKNLLDVKEKFIKLNLFDKAFTLKSFLDLFNRKTMADFSKVGLTKYLGKIQKISSNVLSKNELYLLEESVTGLFVKKIKL

SEQ ID NO: 976 - protein, 1367 aa, Fusobacterium sp.
MKKQKFSDYYLGFDIGTNSVGWCVTDLDYNVLRFNKKDMWGSRLFDEAKTAAERRVQRNSRRRLKRRKWRLNLLEEIFSDEIMKIDSNFFRRLKESSLWLEDKNSKEKFTLFNDDNYKDYDFYKQYPTIFHLRDELIKNPEKKDIRLIYLALHSIFKSRGHFLFEGQNLKEIKNFETLYNNLISFLEDNGINKSIDKDNIKKLEKIICDSGKGLKDKEKEFKEIFNSDKQLVAIFKLSVGSSVSLNDLFDTDEYKKEEVEKEKISFREQIYEDDKPIYYSILGEKIELLDIAKSFYDFMVLNNILSDSNYISEAKVKLYEEHKKDLKNLKYIIRKYNKENYDKLFKDKNENNYPAYIGLNKEKGKKEVVEKSGLKIDDLIKVIKGYLPKPERIEEKDKIIFNEILNKIELKTILPKQRISDNGTLPYQIHEVELEKILENQSKYYDFLNYEENGVSTKDKLLKTFKFRIPYYVGPLNSYHKDKGGNSWIVRKEEGKILPWNFEQKVDIEKSAEEFIKRMTNKCTYLNGEDVIPKDSFLYSEYIILNELNKVQVNDEFLNEENKRKIIDELFKENKKVSEKKFKEYLLVNQIANRTVELKGIKDSFNSNYVSYIKFKDIFGEKLNLDIYKEISEKSILWKCLYGDDKKIFEKKIKNEYGDILNKDEIKKINSFKFNTWGRLSEKLLTGIEFINLETGECYSSVMEALRRTNYNLMELLSSKFTLQESIDNGNKEMNEVSYRDLIEESYVSPSLKRAILQTLKIYEEIKKITGRVPKKVFIEMARGGDETMKNKKIPARQEQLKKLYDSCGNDIANFSIDIKKMKSSLSSYDNNSLRQKKLYLYYLQFGKCMYTGREIDLDRLLQNNDTYDIDHIYPRSKVIKDDSFDNLVLVLKNENAEKSNEYPVKKEIQEKMKSFWRFLKEKNFISDEKYKRLTGKDDFELRGFMARQLVNVRQTTKEVGKILQQIEPEIKIVYSKAEIASSFREMFDFIKVRELNDTHHAKDAYLNIVAGNVYNTKFTEKPYRYLQEIKENYDVKKIYNYDIKNAWDKENSLEIVKKNMKKNTVNITRFIKEEKGQLFDLNPIKKGETSNEIISIKPKLYNGKEEKLNEKYGYYKSLNPAYFLYVEHKEKNKRIKSFERVNLVDVNNIKDEKSLVKYLIENKKLVEPRLIKKVYKRQVILINDYPYSIVALDSNKLMDFENLKPLFLENKYEKILKNVIKFLEDNQGKSEENYKFIYLKKKDRYEKNETLESVKDRYNLEFNEMYDKFLEKLDSKDYKNYINNKKYKNLLDVKEKFIKLNLFDKAFTLKSFLDLFNRKTMADFSKVGLTKYLGKIQKISSNVLSKNELYLLEESVTGLFVKKIKL

SEQ ID NO: 977 - protein, 1367 aa, Fusobacterium sp.
MKKQQFSDYYLGFDIGTNSVGWCVTDFNYNVLRFNKKDMWGSRLFDEAKTAAERRVQRNSRRRLKRRKWRLNLLEEIFSDEILKIDSNFFRRLKESSLWLEDKSSKEKFTLFNDDNYKDYDFYKQYPTIFHLRNELIKNPEKKDIRLVYLALHSIFKSRGHFLFEGQNLKDIKNFETLYNNLMAFLEDNDIYKNIDSSYIGNLENIICDSKKGLKDKEKEFKEIFNSDKQLVGFFKLSVGSSVSLNDLFDTDEYKKGEVEKEKISFREQIYEDDKPIYYSILGEKIEFLDIAKSFYDFMVLNNILADSQYISEAKVKLYDEHKRDLKNLKYIIRKYNKENYDKLFKDKNESNYSAYIGLNKEKGKKEVIEKSRLKIDDFAKIIKGYLPKAEKIDEKDRSIFNEILDKIELKTILPKQRISDNGTLPYQIHEAELEKILENQAKYYDFLNHEENGISTKDKLLMTFKFRIPYYVGPLNSYHKNKGGNSWIVRKEEGKILPWNFEQKVDIEKSAEEFIKRMTNKCTYLNGEDVIPKDSFLYSEYIILNELNKVQVNDEFLNKEIKKKIIEDLFKKSKKISEKNFREYLLVNQITNKTVELKGVKDAFNSNYVSYIKFKDIFGDKLNLDIYKEISEKSILWKCLYGDDKKIFEKKIKSVYGDILTKDEIKKINSFKFNTWGRLSEKLLTEIEFIDLETGECYSSVMDALRRTNYNLMELLSSKFTLQENIDNENKEVSEFSYRDLVEESYVSPSLKRAILQTLKIYEEIRKITGRIPKKVFIEMARGGDETMKNKKIPARQEQLKKLYDSCGKDISNFSIDIKEMKNSLNSYDNNSLRQKKLYLYYLQFGKCMYTGKEIDLNRLLQNNDTYDIDHIYPRSKVIKDDSFDNLVLVLKNENAEKSNEYPLKKEIQEKMKSFWKFLKEKNFISDEKYKRLTGKDEFELRGFMARQLVNVRQTTKEAGKILQQIEPEIKIVYSKAEIASSFREMFDFIKVRELNDTHHAKDAYLNIVAGNVYNTKFTEKPYRYLQEIKENYDVKKIYNYDIKNAWDKEKSLEIVKKNMEKNTVNITRFIKEEKGQLFDLNPIRKGETSNEIIAIKPKFYEGSTEKLNEKYGYYKSLNPAYFIYVEHKEKNKIIRSFERVNLVDVNKIKDEKSLIKYLIENKGLIEPKVIKKVYKRQVILINNFPYSIVALDSNKLMDFENLKPLFLERKYEKILKNAIKFLEDNQGKTEEYYKFLYLKKKDRNEKNETIDSVKERYNIEFNEMYDKFLEKLDSKDYKNYINNKKYSELVNVKEKFIKLNLFDKAFTLKSFLDLFNRKTMADFSKVGLTKYLGKIQKISSNVLSKNELHLLEESVTGLFVKKIKL

SEQ ID NO: 978 - protein, 1391 aa, Galbibacter sp.
MKTILGLDLGTNSIGWALVKEAENENEVSDIIKLGVRVNPLTVDELTNFEGGKAYSNNAERTLKRGARRNLQRYKLRRENLIEILLKNGLINKDTALTEVGKETTHQTLKLRSKSANEKVSLEDLAKILLSINKKRGYKSSRKVNAEDDGVAIDGMEVAKLLYDENMTPGEYVLRLLESGKKHLPDFYRSDLQEEFNLVWKKQSEFYPLILTKELFFELHGKNKSQTWAICKEPLGIVGVKLKGSAKEQKFARYRLRKEALTQQIELEHLAIVLQDINNDSNKSSGYLGAISDRSKELFFNKETVGQYQYKQLQKDPNTSLKNQVFYRQDYLDEFEVIWRNQAKFYPQLTNELKQEIRDVVIFYQRKLKSQKNLISFCQFESTQQNYVEKETGKTKIRTIGRRVIPRSSPLFQEFKIWQSLNNLKFVNSESNQIIQFIELEDDVKKVVFDELNLRGDLKPNQVLKILSKYMKIGKLTQWKCNLEEIEGNRTNSALYNVFQMIAEEEGYGFNWGKKSALEIKSELKAIFSSIGINDSILDFDFSKKLDQQLSYQLWHLLYSAEEGNSKITEEDKFTYGNTGVALKKKLHLKFGFKPEYSTLISNLRFTSDYGNLSSKAISKILPFLRDGSDYSKACQYAGYNHSNSLSADELDNRELKPKLELLKKNSLRNPVVEKILNQMVNVVNQVIDNYGKPDEVRIELARELKKSAKERSQMTKNISDATRRNAEIKKYLSKEFGIPNPTKGDVIRYRLWEELASNGYKDLFRDKYIPKEKLFSNEIDIEHIIPKALLFDDSFSNKTLAFKVDNLKKADRTAFDFMSTDFSKDVDSYIGRIETLHKDGKISSSKYKKLMIPKSKLVDGFIERDLRNTQYIAKQARKMLLEVFKTVVPTTGKITDKLREDWDLINVMKELNFPKYKALGLTKKIERFDVGSEKIKSINVIEGWSKRNDHRHHAMDALAVAFTTHNHIQYLNYLNARKDIHHEMHGTIKSIENQIIGKDVMGKRRFIPPISDLRMKAKLQIESILISFKNKNKVVTWSVNKTKLKGKDNYNKRRQLTPRGQLHKETVYGKIKLIDPKPLKLNNKFTLVRASMIVDKVHREIVLQHLSKYDNNSEVAFDSKTIKIDPILIEGIGLKEVVCYEDVFKIRKKISGDNFKNEKHLEKVIDEKVKQILKDRVIKFQGNFKEAFSNLEENPIWLNKSKGIAVKSVAIKGVNNAESLHEGKDHFGDQILDKNKKQIPVDFVSTGNNHHVGIYEDKDGNLQERVVSFFEAVTRVNEGLPIIDKTYNSDIGWKFKFTMKQNEMFVFPSDDFDPNEFDLTDGKNAAKISPNLYRVQKIATKNYMFRHHLETVVTNDLEFTYKSIRSTGWLRNLVKVRINHLGEIVYVGEY

SEQ ID NO: 979 - protein, 1186 aa, Gardnerella vaginalis
MEGNISYAIGIDVGLNSVGLAAIRLDDYGEPIRILKAMSVIHDAGIDPNGAKESDTRKAISGVARRVRRLYRQRRRRLQKLDFLLQSLGWPVVENKDLDFSDSFIPWIFRAKLADEYIADEEQRKQMLSVAIRHIARHRGWRNPYQSIKSMMQETEYSEFYNELLKNIEKLAPGVGCEGSTPAQLVRDYLLSQQGKASRRLRITTGGRRKNHPHSLDPVLPRKLMQSDNMLEILNIFNVQHIDDKYVREQIINAVFYAESPRGSAENRVGKDAITGKGKRALKASLAFQKYRIISTISNLRIRENSKERCLTIEEKQNVYKLLTTSIDKSSKRKSAEAPLYTWIDVADCLGIERYKLRGVGSQIGDGESVGNRPPMLNSELAILYANNKSLGQSLITWWLASNRTQEDKEALIEILSNTVDIEAIHDNPEYQDKYGSAIAFIDSMNETEIAALENISLPDGRAAYSLETLDELNKQMLETDDDLFEARKKLFNLPNNWRPAEAPIAEPTGNPSVDRVLKIVHRFLISAKNRWGNPERINIEHVRSGFQSKKMANSYKELLDKRTEGKENLKAMMRNSLHLGTSDSISDADIRRYEAVQRQNGQCLYCGSEITYHTCELDHIVPRKGPGSTNTRENLVATCSSCNAQKCNTPFATWCEQSTYCKNHDISADSAINRVRAFIFPPNSYDKRGANQFKKEVIARLKQKVGDEAFDNRSIESVAWMANELHRRIDWYYNSQNYQTNNGISDISNKAQTNVGVYAGSLTAIARRMSGIDGKLEFFDGRRKTRFDRRHHAVDASVIAMMTPGIAQILAIKCNLRETQLLQGNKVVPGGIDWKEYPTANDQGYQQYANWSVRMNALLKLLNEEMRADRIAVVNSIRLRYSNSSVHQYEVNALLKLHVGDEIDSETIRRSSTPALYCALTRNPDYDVNNGFPENPGRTILLHNKKLNADDSITFFKAQAVQLFVREGSAKIGNSIHHLRIYEYFEKLKSGKIKKSYGMIRVFQNDLHRHIHEDLFSCDLPEQSISMRYADTKVAHAVQTGNANYLGYLVPGDEIIVDFSHITLSENIGKFVEFLNKIGADCTAYRHWVVVGTDTEKVLILKPSMISSEGIDKLYSNCERNNFDYSSYEKSINEILAGKGWRVSVNVLAQYKAATIRRNALGEVRWASRSHLPISWSWDTGENRE

SEQ ID NO: 980 - protein, 1186 aa, Gardnerella vaginalis
MEGNISYAIGIDVGLNSVGLAAIRLDNNGEPIRILKAMSVIHDAGIDPNGAKESDTRKAISGVARRVRRLYRQRRRRLQKLDFLLHSLGFPVVENKDLDFSDSFIPWIFRAKLADEYIADEKQRKQMLSVAIRHIARHRGWRNPYQSIKSMTQETEYSEFYNELLKNIEKFAPGVGCEGSTPAQLVRDYLLLQQGKASRRLRITTDEKRKNHPNSLNPILPRKLMQSDNMLEILNIFNVQHIDDKYVREQIINAVFYAKSPRGSAENRVGKDAITGKGKRALKASLAFQKYRIISTISNLRIRENSKERCLTIEEKQSVYKLLTTSTDESSKEKSAEAPLYTWIDVADCLGIERYKLRGVGSQIGDGESVGNRPPMLNSELAIIYANNKSLGKSLLTWWLDANRTQEDKEALIEILSNTVDIEAIHDNPEYQDKYGSAIAFIDSMDETEIAALENISLPDGRAAYSLETLDKLNKQMLETDDDLFEARKKLFNLPNNWRPSEAPIAEPTGNPSVDRVLKIVHRFLISAKNRWGNPERINIEHVRSGFKSKKMANSYKELLDKRTKGKENLKAMMRNSLHLGMSDSISDADIRRYEAVQRQNGQCLYCGSEITYHTCELDHIVPRKGPGSTNTRENLVATCSLCNAQKCNTPFSTWCEQSTYCKNHDISVDSAINRVRAFIFPPNSYDKRGANQFKKEVIARLKQKVGDEAFDNRSIESVAWMANELHRRIDWYYNSQNYQTNNGISDITNKAQTNVGVYAGSLTAIARRMSGIDGKLEFFDGRRKTRFDRRHHAVDASVIAMMTPGIAQILAIKCNLRETQLLQGNKVVPGGIDWKEYPTANDQGYQQYANWSVRMNALLKLLNEEMRADRIAVVNSIRLRYNNSSVHQYKVNALLKLHVGDEIDSGTIRRSSTPALYCALTRNPDYDVNNGLPENPNRAILLHDKKLNADDSITFFKAQAVQLFVREGSAEIGSSTHHLRIYEYFKKLKSGKIKKSYGMIRVFQNDLHRHIHEDLFSCDLPEQSISMRYADTEVAHAVQTGNSNYLGYLVPGDEIIVDFSHVKLSGNIGTFVEFLNKIGANCAAYNHWVVVGTDTEKVLILKPSMISSEGIDKLYSNCKRNNFDYSSYEKSINEILVGKGWRVSVNVLAKYNAETIRRNALGEVRWTSRSHLPISWSWNTGENRE

SEQ ID NO: 981 - protein, 1258 aa, Gemella haemolysans
MTEENPDIRKVFLAIHHILKNRGHFLLQGQSFKEGNLNNLIKELLNLDILHISIEITEENINKITEIALEKKTLTDKVNDLKKIYPKEKQLLEAFRLIFGGKTSLDKLFAIDEYKELDASVKSVSFKEKIYEEVRHDYEQVLSNYIELLDLAKLVYDSIILSDIKKEGKTLSESKVELYHKHREDLTKLKTLVKNDSKLSEDKKVELYSAIFKEDKDKGTNYVNYIRKSEEGKGCNYEDFKKFLVKELAKLEESSAKEEILRDLELELFLPLQRTKDNSVVPYQIHKEELVKILDNAAKYHKFLNEKDDSGYSIIEKVIQLLEFRIPYYVGPLNSSKKAKVDGFAWSVRNKGYENTPVTPWNYEKVIDESASAEKFITNLTNKCTYLKGEDVLPKSSLLYSEFALLNELNALKYDGNRISLEARNVIIEKLFKEQGKKVTKTSIKNLLKAEGYIDGKGEITGIDITVKNDLKSYRDFKKILGDKFNTEHVENIILWITLYGESRKLIKAKIEAVYGDIYSKEEIAKMSRLVYKDWGRFSRKLLTELVSKKLYNEETGECLNIIGAMRQNNILFMELLADRFDYSQQIIDYNKELQKEVTEITPEILDDLYVSPSVKRSIWQTVRIVEELKKIIGCAPAKIFVETTRSNQDKKKPTDSRKKQLELFYKAVKKDVKDLEKEIGSLNFDKLNERLSSVEPSKLKAKKLYLYYTQLGRCMYSGETIDITQLNTTAYDIDHIYPQSKVKDDSFTNTVLVKREYNAAKTDRYPLGSDIQTPSNRRFWKFLKEKGLITDEKYNRLVRTEEFSDEELTGFIARQLVETSQSVKAVAGILGELNPKTSICYSKAENVSSFRQNFGKIKEGNRKSDNTEQLIKVREINDYHHAKDAYLNVVVGNVYDTKFTRNVFNFIKDKKDGRKYSLNNVFYENVSNSNNVAWELNKTVHQVEKVMNNNNILVTRRTSEQKGGLFDATVYKAKVAAKAKEGVYYPLKTSDPVVNDVTKYGGFTKVKIAYYSIFEYTLVNKKGEEKITRIIPIPIYVSQNIKDDSTLLEFGKTQINIKSGEEVKDFKLKYRKLCIGDLVKINNFFNFIGGKTNDSFVYDGAVQVTLDTESERYIKTLSKYQNWKKENKDGELWESITKEKNTELYNLLVEKMNSGIFIKKKPNKFNELNSEEIRNNFSSISLEEQAKVLLEVLNLLTNKKSIFDLKSINITAARGKISFNLSNLSQFSIIEQSVAGFYEKEITIIGDKENDMENNNC

SEQ ID NO: 982 - protein, 1054 aa, Haemophilus parainfluenzae
MENKNLNYILGLDLGIASVGWAVVEIDEKENPLRLIDVGVRTFERAEVPKTGESLALSRRLARSARRLTQRRVARLKKAKRLLKSENILLSTDERLPHQVWQLRVEGLDHKLERQEWAAVLLHLIKHRGYLSQRKNESKSENKELGALLSGVDNNHKLLQQATYRSPAELAVKKFEVEEGHIRNQQGAYTHTFSRLDLLAEMELLFSRQQHFGNPFASEKLLENLTALLMWQKPALSGEAILKMLGKCTFEDEYKAAKNTYSAERFVWITKLNNLRIQENGLERALNDNERLALMEQPYDKNRLFYSQVRSILKLSDEAIFKGLRYSGEDKKAIETKAVLMEMKAYHQIRKVLEGNNLKAEWAELKANPTLLDEIGTAFSLYKTDEDISAYLAGKLSQPVLNALLENLSFDKFIQLSLKALYKLLPLMQQGLRYDEACREIYGDHYGKKTEENHHFLPQIPADEIRNPVVLRTLTQARKVINGVVRLYGSPARIHIETGREVGKSYKDRRELEKRQEENRKQRENAIKEFKEYFPHFAGEPKAKDILKMRLYKQQNAKCLYSGKPIELHRLLEKGYVEVDHALPFSRTWDDSFNNKVLVLANENQNKGNLTPFEWLDGKHNSERWRAFKALVETSAFPYAKKQRILSQKLDEKGFIERNLNDTRYVARFLCNFIADNMHLTGEGKRKVFASNGQITALLRSRWGLAKSREDNDRHHALDAVVVACSTVAMQQKITRFVRFEAGDVFTGERIDRETGEIIPLHFPTPWQFFKQEVEIRIFSDNPKLELENRLPDRPQANHEFVQPLFVSRMPTRKMTGQGHMETVKSAKRLNEGISVIKMPLTKLKLKDLELMVNREREKDLYDTLKARLEAFNDDPAKAFAEPFIKKGGAIVKSVRVEQIQKSGVLVREGNGVADNASMVRVDVFTKGGKYFLVPIYTWQVAKGILPNKAATQYKDEEDWEVMDNSATFKFSLHPNDLVKLVTKKKTILGYFNGLNRATGNIDIKEHDLDKSKGKQGIFEGVGIKLALSFEKYQVDELGKNIRLCKPSKRQPVR

SEQ ID NO: 983 - protein, 1052 aa, Haemophilus parainfluenzae]
MKNTSLNYVLGLDLGISSVGWAVVEIDEKENPLSLIDVGVRTFERAETQKGESLALARRLARSARRLTQRRVARLKKAKRLLKSENILLSTDECLPHQVWQLRVEGLERKLERQEWAAVLLHLIKHRGYLSQRKNESKSENKELGALLSGVANNHKLLQQTTYRTPAELAVKKFEVEEGHIRNQQGSYTHTFSRLDLLSEMELLFSRQQHFGNPFTSEKLLENLTALLMWQKPALSGDAILKMLGKCTFENEYKAAKHTYSAERFIWITKLNNLRIQENGLERALNDNERLALMKQPYEKAKLTYAQVRSILNLSDEAIFKGLRYSGEDKKTSETKTVLMEMKAYHQIRLALEKNDLKTEWAELKVNSSLLDEIGTAFSLYKTDEDISTCLAGKLSQPVLNALLENLNFDKFIQLSLKALHKILPLMQQGLRYDEACAEIYGDHYGKKTEENHLLLPQIPADEIRNPVVLRTLTQARKVINGVVRLYSSPARIHIETGREVGKSYQDRRELEKRQEENRKQREKAISEIKTLFPNFSGEPKAKDILKMRLYYQQNAKCLYSGKPLELHRLLEQGYVEIDHALPFSRTWDDSFNNKVLVLANENQNKGNLTPFEWLDGKNNSERWKAFKALVETSAFPYTKKQRILSQKLDEKGFIERNLNDTRYVARFLCNFIADNMHLTGEGKRKVFASNGQITALLRGRWGLAKSREDNDRHHALDAVVVACSTVSMQQKITRFVRFEEGNVFTGERIDRETGEIIPLHFPAPWKFFREEVEIRIFSDNPKLELENRLIARPQANHEFVQPLFVSRMPTRKMIGQGHMETIKSAKRLNEGLSVIKMLLTKLRLKDLESMVNREREKELYEALKARLEAFNDEPAKAFAEPFMKKGGAIVKSVRVEQVQKSGVLVRDGNGVADNASMVRVDVFTKGGKYFLVPIYTWQVAKGILPNKAVIQGKNEEDWEVMDDATFRFSLHQNDLVKLVTKKKTIFGYFNGLNRATGNIDIKEHDLEKSKVKDGIHQSIGIKLALSFEKYQVDELGKNIRLCKSSKRQAVR

SEQ ID NO: 984 - protein, 121 aa, Haemophilus pittmaniae
MLNRRYAAKITRFVRFEAGDVFTGERIDRETGEIIPLHFPTPWQFFKQEVEIRIFSDNPKLELENRLPDRPQANHEFVQPLFVSRMPTRKMTGQGHMETVKSAKRLNEGISVIKMPLTKLN

SEQ ID NO: 985 - protein, 203 aa, Haemophilus pittmaniae
MVNREREKDLYDALKARLEAFNDDPAKAFAEPFIKKGGAIVKSVRVEQVQKSGVLVREGNGVADNASMVRVDVFTKDGKYFLVPIYTWQVAKGILPNKAATQYKDEEDWEVMDNSAIFKFSLHPNDLVKLVTKKKTILGYFNGLDRATGNIAIKEHDLEKSKAKGGIHQGVGIKLALSFEKYQIDELGKNIRLCNPSKCQSVR

SEQ ID NO: 986 - protein, 1052 aa, Haemophilus sputorum
MKNTSLNYVLGLDLGISSVGWAVVEIDEKENPLSLIDVGVRTFERAETQKGESLALARRLARSARRLTQRRVARLKKAKRLLKSENILLSTDECLPHQVWQLRVEGLERKLERQEWAAVLLHLIKHRGYLSQRKNESKSENKELGALLSGVANNHKLLQQTTYRTPAELAVKKFEVEEGHIRNQQGSYTHTFSRLDLLSEMELLFSRQQHFGNPFTSEKLLENLTALLMWQKPALSGDAILKMLGKCTFENEYKAAKHTYSAERFIWITKLNNLRIQENGLERALNDNERLALMKQPYEKAKLTYAQVRSILNLSDEAIFKGLRYSGEDKKTSETKTVLMEMKAYHQIRLALEKNDLKTEWAELKVNSSLLDEIGTAFSLYKTDEDISTCLAGKLSQPVLNALLENLNFDKFIQLSLKALHKILPLMQQGLRYDEACAEIYGDHYGKKTEENHLLLPQIPADEIRNPVVLRTLTQARKVINGVVRLYSSPARIHIETGREVGKSYQDRRELEKRQEENRKQREKAISEIKTLFPNFSGEPKAKDILKMRLYYQQNAKCLYSGKPLELHRLLEQGYVEIDHALPFSRTWDDSFNNKVLVLANENQNKGNLTPFEWLDGKNNSERWKAFKALVETSAFPYTKKQRILSQKLDEKGFIERNLNDTRYVARFLCNFIADNMHLTGEGKRKVFASNGQITALLRGRWGLAKSREDNDRHHALDAVVVACSTVSMQQKITRFVRFEEGNVFTGERIDRETGEIIPLHFPAPWKFFREEVEIRIFSDNPKLELENRLIARPQANHEFVQPLFVSRMPTRKMTGQGHMETIKSAKRLNEGLSVIKMLLTKLRLKDLESMVNREREKELYEALKARLEAFNDEPAKAFAEPFMKKGGAIVKSVRVEQVQKSGVLVRDGNGVADNASMVRVDVFTKGGKYFLVPIYTWQVAKGILPNKAVIQGKNEEDWEVMDDATFRFSLHQNDLVKLVTKKKTIFGYFNGLNRATGNIDIKEHDLEKSKVKDGIHQSIGIKLALSFEKYQVDELGKNIRLCKSSKRQAVR

SEQ ID NO: 987 - protein, 1338 aa, Helcococcus kunzii
MQDYYLGLDIGTNSVGWAVTDENYNLLRKKGKDLWGVRLFKEAQPATERRGHRSSRRRTIRKSLRKQLLRELFEEEINAIDKDFFLRLDESKYWLEDKKIEGKYSLFNDENFTDKDYYEKFPTIFHLRKALIESDDKEDIRLYFLAINQMMKRRGHFLIDGKLSNVEDITPFKECIQNLINEELDTEIETEFYDKAIKIVSDYSLKKTEKKNLIKDLVKETDSIEDSKKIINIFNLLISGKSKVNGIFDDEEILEKIKEDNKEDFYLTSEKYEENLEYFSQLLDYRFELISSLKSIYDYIILQEVLKGKKYLSYAQVERYKNHKEDLRKLKQLIKKYDKNGKIYYQIFRDENFKKGYVAYLGYYKKNKKNVPVKKCDYDTFSKNIKSTLDKICDKEDPLYIELIDKIEKGGFLLKQIVSTNSVIPHQVHELELDKILENLEKNYPSFKEISDGVSKIDKIKMIFNFRIPYYVGPLNDYHKDKVNSNTWIVKNEGFENENIRPWNFSKIVDEHACEEEFIKRMINECSYIPGEKVLPKSSLLYSEYMVLNELNNLRVNGDKLNPKIKKEIVENIYKKERKVTLKKIRNFLIINNYVDSKVEFSGLSDGIKANMSSYIDFAEILDDNFDNNMVEDLIEQITIHVGNVKLLTEKISNKYPNLEKKQINKIVNLKFKDWARFSRKLLVGIEGTEKETGEINTIIGFLRETNENFMELMSNRYTFSEEISEIKKKYIPNKLSKQIVDDLYVSPAVKKMIWQVLNINDELIKVLGKQPKKIFIEMARGKEEKPEVKDSRKNKLIELYKNLGKEGKEWLNRIEDKTEADFRNRALYLYYTQMGRCMYTGEIIDIERLYDKELYDLDHIIPRKMKKDDSIHKNLVLVTRNSNQYEKKDNYPVPEVIKSRENVRHLWYALKKKGLITEEKYNRLTRINPLSDKELSEFIERQLVETRQTTKVVKDLFENYYTDSKIVTVKAGLVSELRRDFEVLKCREINDLNHAHDAFLNIIVGDVWSKKFTSNPYNFVKKNREKYTLNNIFTKNQKDLRGNEIWNCAEGKKRIIKTLNKPSVLFSVENFEQTGQLFDQNIIGKQDYKEKTSYVPIKGDERLQDISKYGGYRGISGAYFFIVEHTEKNKRVKTIESLPIYMKSYVEENGLLDFCTNEMKLVDPKIIVKKLNYKSEIIVDGFKYLISGKTENRLSLETNEYLYWNHTQTTDIKKILNINEKIELEKYNGDIESERENIIKYIQIILEKFKLKPFIKRRNLPNIEINFADYETEKLLQLLVNLIPLTTKYVSPVDLTVISGSKYAGKVLIPKKISNLNEVIFISKSITGIYESRRRII

SEQ ID NO: 988 - protein, 1023 aa, Helicobacter cinaedi
MKIYSFDIGVASIGWAFIENEVLQDCGIRIFTKAENPKNGASLALPRREARGVRKRLARRRGRLNTIKQLLCKEFGLQLEDYLSNDGELPKAYTASKANPLKSPYELRTLALSQKLDSKDLVRVILHIAKHRGYGNKHAKDSKDTESGKVKKAIEFNRKTLAEKGYRSVGEYLYREFFQQSRISQNNGATEFINVRNKAGNYEHCVAQDMLKEELESILNAQRQFGFSLKQDFENKLLTKIFEQRPLKSFADKVGNCCFIAGEKRTPKDSLSAIEFIALSRTINTLINLSKESGEIYNRAIILQIVESTLKKGEISYKELREIIRLDERLRFKDPRLDYSREIKEAEKVKFLEFKQLKGFKKALGESFTTLARSQLDEIAEHIALIKDRVKLNEKLESYALTKEQREALSNLSFSAHINLSLQALKQILPFMRGDNGEQCLDYDESVEKAGLKALSKDTLKGQMLPPLNEFEPYLSNPVVARALAEYRKVLNALLKQYGSPHKIHIEYAREAKLSSTERQKYEKEQKDNYAANQAAHKKCQELGLEPSSTNLLKLKLWQEQGGLCLYSGAKITISYLQDPTALQVDHIYPYSRSFDDSYMNKCLVLTKANQEKGNRTPFEAFGTDSAKWGVITTLAQKLPHKKRRRILNTAFNDKEAGFKLRNLNDTSYIARLVADYTETYLEFLPLVESENTTLGKGQKGSKKHIAIVNGALTSTMRYYLGFASKDRDNHLHHALDAVIIGFMNDSVIKAFSDFKKTQETSKAAYYAHTLSKQEYKKQRAFIQLPSGENFRASVLEKVESVFVSKPPRKRVRGALHEATFYSPNDPKLLKNYGGTKGVERALALGKMRKVGAKIVSNGAMVRVDIFRHKSSGKFYGVPVYTMDFALGILPNKAVVVGKDKNGVIKDWLEMDSSYEFIFSLYKDDLLLVQKKEMAEPELCYFMSFNSSIAQISVAKHDNNFSTLTKNQKLLFSNATQEDVSGKSIGIQNLQVFEKWQVSVLGEVKRTQSYPRENISLASKAKK

SEQ ID NO: 989 - protein, 1023 aa, Helicobacter cinaedi
MKIYSFDIGVASIGWAFIENEVLQDCGIRIFTKAENPKNGASLALPRREARGVRKRLARRRGRLNTIKQLLCKEFGLQLEDYLSNDGELPKAYTASKANPLKSPYELRTLALSQKLDSKDLVRVILHIAKHRGYGNKHAKDSKDTESGKVKKAIEFNRKTLAEKGYRSVGEYLYREFFQQSRISQNNGATEFINVRNKAGNYEHCVAQDMLKEELESILNAQRQFGFSLKQDFESKLLTKIFEQRPLKSFADKVGNCCFIAGEKRAPKDSPSAIEFIALSRTINTLINLSKESGEIYNRAIILQIVESTLKKGEISYKELREIIRLDERLRFKDPRLDYSREIKEAEKVKFLEFKQLKGFKKALGESFTTLAISQLDEIAEHIALIKDRVKLNEKLESYALTKEQREALSNLSFSAHINLSLQALKQILPFMRGDNGEQCLDYDESVEKAGLKALSKDTLKGQMLPPLNEFEPYLSNPVVARALAEYRKVLNVLLKQYGSPHKIHIEYAREAKLSSTERQKYEKEQKDNYAANQAAHKKCQELGLEPSSTNLLKLKLWQEQGGLCLYSGAKITISYLQDPTALQVDHIYPYSRSFDDSYMNKCLVLTKANQEKGNRTPFEAFGTDSAKWGVITTLAQKLPHKKRRRILNTAFNDKEAGFKLRNLNDTSYIARLVADYTETYLEFLPLVESENTTLSKGQKGSKKHIAIVNGVLTSTMRYYLGFASKDRDNHLHHALDAVIIGFMNDSVIKAFSDFKKTQETSKAAYYAHTLSKQEYKKQRAFIQLPSGENFRVSVLEKVESVFVSKPPRKRVRGALHEATFYSPNDPKLLKNYGGTKGVERALALGKMRKVGAKIVSNGAMVRVDIFRHKSSGKFYGVPVYTMDFALGILPNKAVVVGKDQNGVIKDWLEMDSSYEFIFSLYKDDVILVQKKEMQRPELCYFVSFDTSGASIKVAKHDNNFSTLTENQKLLFSNATKEEVVGKSIGIQNLKVFEKWQVSVLGEVKRTQSYPRENISLASKAKK

SEQ ID NO: 990 - protein, 344 aa, Helicobacter pullorum
MKILGFDIGIASIGWAFVENGELKDCGVRIFTKAENPKTGDSLAMPRREARSVRRRLARRKGRLETLKRLLAKEWDLCYEDYIAADGELPKAFMGKNLTNPYVLRYEALQRLLSKEELVRVVLHIAKHRGYGNKNAKITKSEESKREQGKILSALATNASVIARYRTVGEYFYKEFCEVIKNPQGLNTNENCTQPKVRVLKPIRNKGGEYTNCILQEDLQRELRCIFEHQKGFGFSITQEFQDKILKIAFYQRSLKDFSHLVGKCTFYPDEPRAPKFSLSAIEFITKAKAINLLASIAKESGEVWDKEQWRERLDSVFSAVCERGINTIPSSSHFLNIFDILYL

SEQ ID NO: 991 - protein, 1688 aa, Ignavibacterium album
MEFKKVLGLDIGTNSIGCALLSLPKSIQDYGKGGRLEWLTSRVIPLDADYMKAFIDGKNGLPQVITPAGKRRQKRGSRRLKHRYKLRRSRLIRVFKTLNWLPEDFPLDNPKRIKETISTEGKFSFRISDYVPISDESYREFYREFGYPENEIEQVIEEINFRRKTKGKNKNPMIKLLPEDWVVYYLRKKALIKPTTKEELIRIIYLFNQRRGFKSSRKDLTETAILDYDEFAKRLAEKEKYSAENYETKFVSITKVKEVVELKTDGRKGKKRFKVILEDSRIEPYEIERKEKPDWEGKEYTFLVTQKLEKGKFKQNKPDLPKEEDWALCTTALDNRMGSKHPGEFFFDELLKAFKEKRGYKIRQYPVNRWRYKKELEFIWTKQCQLNPELNNLNINKEILRKLATVLYPSQSKFFGPKIKEFENSDVLHIISEDIIYYQRDLKSQKSLISECRYEKRKGIDGEIYGLKCIPKSSPLYQEFRIWQDIHNIKVIRKESEVNGKKKINIDETQLYINENIKEKLFELFNSKDSLSEKDILELISLNIINSGIKISKKEEETTHRINLFANRKELKGNETKSRYRKVFKKLGFDGEYILNHPSKLNRLWHSDYSNDYADKEKTEKSILSSLGWKNRNGKWEKSKNYDVFNLPLEVAKAIANLPPLKKEYGSYSALAIRKMLVVMRDGKYWQHPDQIAKDQENTSLMLFDKNLIQLTNNQRKVLNKYLLTLAEVQKRSTLIKQKLNEIEHNPYKLELVSDQDLEKQVLKSFLEKKNESDYLKGLKTYQAGYLIYGKHSEKDVPIVNSPDELGEYIRKKLPNNSLRNPIVEQVIRETIFIVRDVWKSFGIIDEIHIELGRELKNNSEERKKTSESQEKNFQEKERARKLLKELLNSSNFEHYDENGNKIFSSFTVNPNPDSPLDIEKFRIWKNQSGLTDEELNKKLKDEKIPTEIEVKKYILWLTQKCRSPYTGKIIPLSKLFDSNVYEIEHIIPRSKMKNDSTNNLVICELGVNKAKGDRLAANFISESNGKCKFGEVEYTLLKYGDYLQYCKDTFKYQKAKYKNLLATEPPEDFIERQINDTRYIGRKLAELLTPVVKDSKNIIFTIGSITSELKITWGLNGVWKDILRPRFKRLESIINKKLIFQDEDDPNKYHFDLSINPQLDKEGLKRLDHRHHALDATIIAATTREHVRYLNSLNAADNDEEKREYFLSLCNHKIRDFKLPWENFTSEVKSKLLSCVVSYKESKPILSDPFNKYLKWEYKNGKWQKVFAIQIKNDRWKAVRRSMFKEPIGTVWIKKIKEVSLKEAIKIQAIWEEVKNDPVRKKKEKYIYDDYAQKVIAKIVQELGLSSSMRKQDDEKLNKFINEAKVSAGVNKNLNTTNKTIYNLEGRFYEKIKVAEYVLYKAKRMPLNKKEYIEKLSLQKMFNDLPNFILEKSILDNYPEILKELESDNKYIIEPHKKNNPVNRLLLEHILEYHNNPKEAFSTEGLEKLNKKAINKIGKPIKYITRLDGDINEEEIFRGAVFETDKGSNVYFVMYENNQTKDREFLKPNPSISVLKAIEHKNKIDFFAPNRLGFSRIILSPGDLVYVPTNDQYVLIKDNSSNETIINWDDNEFISNRIYQVKKFTGNSCYFLKNDIASLILSYSASNGVGEFGSQNISEYSVDDPPIRIKDVCIKIRVDRLGNVRPL

SEQ ID NO: 992 - protein, 1354 aa, Indibacter alkaliphilus
MKKILGLDLGTTSIGWAFIKEPEKDVVGSEIVDMGVRIVPLSSDEENDFAKGNTISINADRTLKRGARRNLQRFKQRRNALLETFKEKNLIPSNFQYAEDGPSSTFSTLKLRDKAAKEKIELDDFVKVLLQINKKRGYKSSRKAMSEEDEGTAIDSMGIAKELYENDLTPGQWVYEALKNGRKNVPDFYRSDLQEEFKKIVNYQSEFYPDILNTSFVEDWMGKASTPTKQYFNKRGVQLAENKGKREERRLQEYKWRAEAVNFKIDLSEIALILSQINSQISNSSGYLGAISDRSKELYFKNLTVGQYLYQQVKKNPHTRLKGQVFYRQDYLDEFEKIWSVQSSFYPQLNDELKQEVRDVTIFFQRRLKSQKHLISNCEFEEHHKVVPKSHPIFQEFRIWQNLNNLTLIKKDNLNEKCELALEDKTALANELAFKKELSVKDALKVLGLKPSDWEFNFTKIEGNRTNHAFFEAFAKIIELEDGEPIDLGNLKADDILDQFSEAFLRIGIDTELLQVNSDIEGAEYEKQSYIQFWHLLYSSEDDQKLKQNLIRKFGFKPEHAKILASISLQDDHASLSSRAIKKILPHLQSGLIYDKACTYAGYNHSSSFTKDENEKRELRAELELLKKNSLRNPVVEKILNQMINVVNAILKDPNLGRPDEIRVEMARELKANAEQRKNMTSNIASATRDHEKYREILKKEFGLKRVTKNDLLRYKLWLETDGISLYTGKPIEASKLFSKEYDIEHIIPKARLFDDSFSNKTICERQLNIDKANVTAFSFLQNKLSADEFEQYQSRVKSLYGKLSKAKIQKLLMANDKIPEDFIARQLQETRYISKKAKEILFEITMRVSVTTGTITDKLREDWGLVEIMKELNWEKYDKLGLTYTIEGKHGERLNKIKDWNKRNDHRHHAMDALTVALTKPAYIQYLNNLNAKAIGNKKGTEIFAIEQKYLKRENGKLCFIPPIENIRAEAKKHLSKILVSYKAKNKVVTINKNKTKKKAGFNEQTALTPRGQLHKETVYGKSFHYSTKFEKIGASFDAQKINTVAKKEEREALLKRLAENGNDPKKAFTGKNSLNKMPIYLDLGKNIKLSEKVKTVVLEQNYTIRKNIDPDLKVDKVIDVGIKRILESRLEEFGGNAKLAFSNLEENPIWLNKEKGIPIKRVKISGVSNVESLHVKKDHFGEKILDEEGNEIPVDFVSTGNNHHVAIYEDEDGNLQDEVVNFYEAVIRRNQGESIIKYRHEEGWNFLYSIKQNEFFVFPSQDFNPNDFDLLDPKNYDLISPNLYRAQKFSKVMYGNSAVRDYVFRHHLETVLNDVKELKDVAYKQLKSLQYLNGIKKVRLNHLGQIIQVGEY

SEQ ID NO: 993 - protein, 1397 aa, Joostella marina
MKKVLGLDLGTNSIGWALVNEATKEEKKEGKSSEIIKLGVRVNPLTVDEKTNFEKGRPLSTNADRTLKRSARRNLQRYKLRRRNLIEILIKNGFITKDTPLTETGKDTTHQTLKLRAKSAKEKVDLKDFAKILLTINKKRGYKSSRKVNSDEDGLAIDGMAVAKHLYEQNLTPGQYVLNLLQKNKKYVPDFYRSDLQEEFKNIWNNQKTYYFDILTDTLFEELKDKNKSQTWAICKKPFDIAGIKQIGKASDKRLERYKWRTEGLTQKLNLEYLAIALQEINNDINKSSGYLGAISDRSKELFFNKETVGENLYRQLVKTPHTSLRNQVFYRQDYLDEFETIWETQAKFYPQLTHTLKEEIRDVIIFYQRKLKSQKSLISFCQFESWEQTYIEKETGKSKTRTVGRKVIPKSSPLFQEFKIWQNLNSLEFRNSDEGEIIEFIKLDEDIRQTVFEELNLRGNLKPNDVLKILGNYISLGKVSQWKCNFEEIEGNRTNAALYNVYQIIAENEGYGFDWAKKTASEINKELKNIFPQLGIDASILDFDFTQANFDKQTSYQLWHLLYSAEEDFKISEEDKVLYGNSSVSLKKKLHQKYGFKPEYTKLLTNISLQPDYGNLSAKAICNILPYLKENNVYSEACDLTGYNHSNFLTAEEQAKRPLKPILELLKKNSLRNPVVEKILNQMVNVVNQVIETYGKPDEIRIELTRELKKSAKERANMTKSIADATRRNDDYRKTIIKEFGIPNPTKSDVVRYRLWQELASRGYKDIFTDTEIKPQELFSNKIDIEHIIPKALLFDDSFSNKTLAFKKDNLKKANRTAYDFIANDYAPNLENYIERVESLHKDRKITRAKRNKLLMLQSKLPDGFIERDLRNSQYITKEAKKMLYEVCRTVVSTSGSITDKLREDWDLINVMKELNFPKYKALGLTEKIERYDIGAEKMKEVEIIEDWNKRNDHRHHAIDALTVAFSTHSHIQYLNHLNARRDEGHKKHAAIIAIESTITEKEGNKKRRFIAPLPNFRLQAKEHIESILVSFKNKNKVVTNNINKTKRIKKDKFNTKVQLTPRGQLHKETIYGKIKQPLEKHIKLNKSFTLEQAKLIIDKRQREKVLNHLEKYAHNSDIAFNSKTLKKNPLLISDEPLKEVLCFEEVFTIRKDISYDNFKNEKQLDKVIDEKVKQALKERINQYNGDFREAFSDIERNPIWLNKAKGICVKRATIKGVSNAEPLHTAKNHLGEEVLTENKEQIPVDYVSTGNNHHVAIYEDEDGNLQEKVVSFYEAVIRVNEGLPIIDKEYNKSLGWTFKFTMKQNEMFVFPSEDFNPTEIDLLDQKNASLISPNLFRVQKFTIKDYFFRHHLETTVENNNTLKNTTWRREGLSGIYGIIKIRLNHLGEIVQVGEY

SEQ ID NO: 994 - protein, 1060 aa, Kingella kingae
MAAKSLNYILGLDLGIASCGWAVVEMDEQENPLRLIDVGVRTFEEAENPKDGSSLAETRRLARAQRRLISRRANRMNKLCRLLKQENVLQANDYDEKGLIIGLPNQAWELRAQGLDRKLEPKEWAAVLIHLVKHRGYLSQRKNESQTADKELGALLSGMNHNHQLLQSQSNQYRTPAELAIKQFATQDGHIRNQRGAYTHTFNRLDLQNELNQLFDAQTRLGNPHVSGSLKTAINDLLMNQKAALSGDAILEMLGRCTFEPSEYKAAKNTYSAERFVWLGKLTNLRIQDNGLESALSREQRELLLNEPYNKTKLTYQQVRKLLRLPETAFFKGLRYGKDNAESATFMEMKSYHAIRKSLENKSLKSEWEKLKTQPKLLDLIGTAFSIYKTDDEIAGCLKNQLPENVIIALQGQLNFSNFMELSLKALEKLLPLMEQGLRYDEACTQIYGNRHEKIADKTEKFLPNIPADKLRNPVVLRTLTQARKVINAIIRRYGSPARVHIETGREVGKSFSDRDKLKKQQEENQEQRRRAIDEWKQFFPNAAHEPKAVDILKLRLYQLQQGKCLYSGLPIDVRRLPEKGYVEIDHALPFSRTWDDSFNNKILVLASENQNKGNQTPYEYLRGADNSESWRLFVENVQNCQFSPNKKQKIMAKQLDEKGFLERNLNDTRYVSRFLCQFISEHLHLTGKGKKRVFASNGQITALLRGRWGLSKNREENDRHHAVDAVVVACSTVAMQQKITQFVRYQKGNVFTGERIDKETGEVISIHFPTPWEHFREEVMIRVFDDNPLRTLPEKLPNRPEALHEYVMPLFVSRMPTRKMTGQGHKETIKSAKRLDEKISVLRVPLTQLKLNDLENMVNREREPALYEALKARLEQFKNDPAKAFAEPFFKQGGQQVKAVRVEIVQKSGMLLRKINGVADNGSMVRVDVFEKSGKFYLVPIYAWQVAEGILPNYAVVAHKDESDWILMDESYHFKFALYKNDLLEVQTKKGGIMGYFASLDRATGAITIREHDRDKKKCKDGEHRSIGVKMASSFKKLQVDELGKNIHETRSRKRPNIG

SEQ ID NO: 995 - protein, 1314 aa, Lactobacillus animalis
MLKKDYSIGLDIGTNSVGHAVVTDDYKVPTKKMKVFGDTSKKTIKKNMLGVLLFNEGQTAADTRLKRGTRRRYTRRKNRLRYLQEIFAPELAKVDPNFLYRLEESSLVAEDKKYDVYPIFGKREEELLYHDTYKTIYHLRSALANNDQPADLRLVYLALAHIIKYRGNFLLEGEIDLRTTDINKVFAEFSETLNENSDENLGKLDVADIFKNNTFSKTKKSEELLKLSGAKKNQLAHQLFKMMVGNMGSFKKVLGTDEEHKLSFGKDTYEDDLNDLLAEAGDQYLDIFVAAKKVYDAAILASILDVKDTQTKTVFSQAMIERYEEHQKDLIELKRVFKKYLPEKCHDFFSEPKISGYAGYIDGKVSEEDFYKYTKKTLKGIPETEEILQKIDANNYLRKQRTFDNGAIPHQVHLKELVAIVENQGKYYPFLRENKDKFEKILNFRIPYYVGPLARGNSKFAWLTRAGEGKITPYNFDEMIDKETSAEDFIKHMTINDLYLPTEPVLPKHSLLYERYTIFNELAGVRYVTENGEAKYFDAQTKRSIFELFKLDRKVSEKMVIKHLKVVMPAIRIQALKGLDNGKFNASYGTYKDLVDMGVAPELLNDEVNSEKWEDIIKTLTIFEGRKLIKRRLENYRDFLGEDILRKLSRKKYTGWGRLSAKLLDGIYDKKTHKTILDCLMTEDYSQNFMQLINDDNYSFKETIKNAQVIEKEETLAKTVQELPGSPAIKKGILQSLEIVDEIIKVMGYKPKSIVVEMARETQKTHGTRKREDRVQQIVENLKDANELPEKLPSNAELSDERKYLYCLQNGRDMYTGAPLDYDHLQFYDVDHIIPQSFLKDDSIENKVLTIKKENVRKTNGLPSEAVIQKMGSFWKKLLDAGAMTNKKYDNLRRNLHGGLNEKLKERFIERQLVETRQITKYVAQLLDQRLNYDGNGVELDEKIAIVTLKAQLASQFRSEFKLRKVRALNNLHHAHDAYLNAIVANLIMAKYPELEPEFVYGKYRKAKFKGLGKATAKNTLYANVLYFLKENEVYPFWDKARDLPTIKRYLYRAQVNKVRKAERQIGGFSDEMLVPKSDSGKLLPRKEGLDPVKYGGYAKAVESYAVLITADEVKKGKTKKVKTLVNIPIIDSKKYEADPTAYLASRGYTNVTNSFILPKYSLLEDPEGRRRYLASFKEFQKANELILPQHLVELLYWVNAKDGEQKLEDHKAEFKELFDKIMEFADKYVVAPKNSEKIRRLYEENQDATPMELGKNFVELLRYTADGAASDFKFFGENIPRKRYNSAGSLLNGTLIYQSKTGLYETRIDLGKL

SEQ ID NO: 996 - protein, 1371 aa, Lactobacillus buchneri
MKVNNYHIGLDIGTSSIGWVAIGKDGKPLRVKGKTAIGARLFQEGNPAADRRMFRTTRRRLSRRKWRLKLLEEIFDPYITPVDSTFFARLKQSNLSPKDSRKEFKGSMLFPDLTDMQYHKNYPTIYHLRHALMTQDKKFDIRMVYLAIHHIVKYRGNFLNSTPVDSFKASKVDFVDQFKKLNELYAAINPEESFKINLANSEDIGHQFLDPSIRKFDKKKQIPKIVPVMMNDKVTDRLNGKIASEIIHAILGYKAKLDVVLQCTPVDSKPWALKFDDEDIDAKLEKILPEMDENQQSIVAILQNLYSQVTLNQIVPNGMSLSESMIEKYNDHHDHLKLYKKLIDQLADPKKKAVLKKAYSQYVGDDGKVIEQAEFWSSVKKNLDDSELSKQIMDLIDAEKFMPKQRTSQNGVIPHQLHQRELDEIIEHQSKYYPWLVEINPNKHDLHLAKYKIEQLVAFRVPYYVGPMITPKDQAESAETVFSWMERKGTETGQITPWNFDEKVDRKASANRFIKRMTTKDTYLIGEDVLPDESLLYEKFKVLNELNMVRVNGKLLKVADKQAIFQDLFENYKHVSVKKLQNYIKAKTGLPSDPEISGLSDPEHFNNSLGTYNDFKKLFGSKVDEPDLQDDFEKIVEWSTVFEDKKILREKLNEITWLSDQQKDVLESSRYQGWGRLSKKLLTGIVNDQGERIIDKLWNTNKNFMQIQSDDDFAKRIHEANADQMQAVDVEDVLADAYTSPQNKKAIRQVVKVVDDIQKAMGGVAPKYISIEFTRSEDRNPRRTISRQRQLENTLKDTAKSLAKSINPELLSELDNAAKSKKGLTDRLYLYFTQLGKDIYTGEPINIDELNKYDIDHILPQAFIKDNSLDNRVLVLTAVNNGKSDNVPLRMFGAKMGHFWKQLAEAGLISKRKLKNLQTDPDTISKYAMHGFIRRQLVETSQVIKLVANILGDKYRNDDTKIIEITARMNHQMRDEFGFIKNREINDYHHAFDAYLTAFLGRYLYHRYIKLRPYFVYGDFKKFREDKVTMRNFNFLHDLTDDTQEKIADAETGEVIWDRENSIQQLKDVYHYKFMLISHEVYTLRGAMFNQTVYPASDAGKRKLIPVKADRPVNVYGGYSGSADAYMAIVRIHNKKGDKYRVVGVPMRALDRLDAAKNVSDADFDRALKDVLAPQLTKTKKSRKTGEITQVIEDFEIVLGKVMYRQLMIDGDKKFMLGSSTYQYNAKQLVLSDQSVKTLASKGRLDPLQESMDYNNVYTEILDKVNQYFSLYDMNKFRHKLNLGFSKFISFPNHNVLDGNTKVSSGKREILQEILNGLHANPTFGNLKDVGITTPFGQLQQPNGILLSDETKIRYQSPTGLFERTVSLKDL

SEQ ID NO: 997 - protein, 315 aa, Lactobacillus casei
MFKDYLKQLEDDGTAKAIRQLYDRYIDGDDAKPFVREDFVKALTKEVTAHPNAKSPELLERLAQPDFMLKQRNKANGAIPVQMQQRELDQIIKNQSVYYDWLAAPNPVEKHRKSMPYQLDELLNFRIPYYVGPLVTAKEQKAARGGVFAWMVRKDPDGNITPYNFDEKVDREASANTFIQRMKTTDTYLIGEDVLPKQSLLYQSYEVLNELNNVRVNDNKLSFDQKQQVLGELFERHNTVTIKQFVDNLLAHGDYDRIPEVRGLADEKRFLSSLSTYNQLKGILHEAIDDSDKQTDMVDCKINPNAVRTKKISFL

SEQ ID NO: 998 - protein, 236 aa, Lactobacillus casei
MFKDYLKQLEDDGTAKAIRQLYDRYIDGDDAKPFVREDFVKALTKEVTAHPNAKSPELLERLAQPDFMLKQRNKANGAIPVQMQQRELDQIIKNQSVYYDWLAAPNPVEKHRKSMPYQLDELLNFRIPYYVGPLVTAKEQKAARGGVFAWMVRKDPDGNITPYNFDEKVDREASANTFIQRMKTTDTYLIGEDVLPKQSLLYQSYEVLNELNNVRVNDNKLSSSIFKSSATMITNS

SEQ ID NO: 999 - protein, 1389 aa, Lactobacillus casei
MIIRTYELKTITTIAILKMFQLLTGGLSMTKLGKPYGIGVDIGSNSIGFAAVDENSHLIRLKGKTVIGARLFEEGKAAADRRASRTTRRRLSRNRWRLSFLRDFFESHITPTGPNFFMRQKYSEISPKDKARYKYEKRLFNDRTDAEFYQQYPTMYHLRNRLLTDPSKADVREIYFAIHHILKSRGHFLTSGYAKDFNTNKVALNEIFPALQDAYAQVYPDLDITFDENKVNEFKTVLLNEKATPSDTQRALVNLLLAEDGDKDILKQQKQVLTEFAKAVVGLKTKLNVALGTEVDSSEATVWNFSLGQLDDKWAGIESAMTDEGTEILDQIRDLYRARLLNGIVPAGKTLSQAKVDDYAQHHEDLELFKDYLKQLEDDGTAKAIRQLYDRYIDGDDAKPFVREDFVKALTKEVTAHPNAKSPELLERLAQPDFMLKQRNKANGAIPVQMQQRELDQIIKNQSVYYDWLAAPNPVEKHRKSMPYQLDELLNFRIPYYVGPLVTAKEQKAAQGGVFAWMVRKDPDGNITPYNFDEKVDREASANTFIQRMKTTDTYLIGEDVLPKQSLLYQRYEVLNELNNVRVNNEKLSIEQKQQVIRELFERHNSVTIKQFAENLRAHGDYAHIPEIRGLADEKRFLSSLSTYRQLKSLLPDAIDDPAKQADIENIIAWSTVFEDAAIFKTKLKEINWLDSQTITKLSNIRYRGWGQFSHKFLNGLTLGNGHTIIQELFLSNNNLMQILTDETLQKKMTELNADKLKAANINDAIDDAYTSPSNKKALRQVLRVIEDIKRAADGQDPSWLYVETADGGGTPGKRTRARQHQLQEIYANAAHELIDSAVRGELEDKIADKADFNDRLVLYFMQGGRDIYTGTPLNIDQLSSYDIDHILPQSLIKDNSLDNRVLVHAIINREKNATFASTIYAQKMNATWRQWHEAGLISGRKLRNLQMRPDQIDKYASGFVARQLVETRQIIKLTEQIVAAQYPETKIIAVKAGLSHQLREELEFPKNRDVNHYHHAFDAFLAARIGTYLLKRFPNLQAFFTYGKFKKADVKKLRGFNFIRDITHAEDKIVVKDTGEVIWDKKRDVDELDRIYNFKRMLITHEVHFEKADLFKQTVYGAKDSKEAGGKKQLISKKKGYPVDIYGGYTQETGSYLSVVRLTKKAMYAVVKVSTRDAAKLAVAKSISEQKENETLNDIIDEKLSKISKNGKITHELFEVVLPRVGQKTLFKNSKYNLFLVNSDTYMHNYQELWMPREYQKMWKDISLSKYGDAQTEDQLDQIFGFIVSQVNSYFNLYDINQFRKKLNDAADKFATLPMRDTDDMQGKIATIGQLLIGLQANAARSDLRNLDIKTPLGLLQIPNGISLDSDTSVVYQSPTGLLEREVHLSDL

SEQ ID NO: 1000 - protein, 412 aa, Lactobacillus casei
MIKDNSLDNRVLVHPLVNREKDTIFASTRFAKQTNGMWRQWHAAGLISSRKLRNLQMRPDEIDKYASGFVARQLVETRQIIKLTEQIVADQYPDTKIIAVKAGLSSQLRKELDFPKNREVNHYHHAFDAFLAARIGTYLLKRYPNLEPFFTYGKFKKTEVKKLKSFNFIRDMTHAKDKIVAKETGEIVWDNASDINELDRIYNFKRMLITHEVRFETASLFKQTLYAAKNPKNRGGSRQLIPKKKGYLVDIYGGYTQETGSYLSVVRLTKKAMYAVVKVSTRDAAKLAVAKSISEQKENETLKKIIDGKLSKTSKKGKTTHQLFEIVLPRVGQKTLFKNSKYNQFLVNSDTYMHNYQELWMPREYQRMWKDILLSNHGDAQIEGQLDQIFKFIVSQVNSYFNLYDINQFRKK

SEQ ID NO: 1001 - protein, 234 aa, Lactobacillus casei
MKVTKKTETIFKVVKIATSQVAALNKARSRSTAEELSVLTELLKPKFSKVGKNGKITDTPFEVVLPRVPREQLFYNAKYGFFMVNSDTMFHNFQEIWVSRSDQKILQQIRKAKIDYPNVDQDLDNLFHNLADQIVKYFDLYSIAGFKEKISQSQNTFNDLAVDDTDQSVGKITVINELLKGAQANGMTGSLKVLKISTPFGFTQDKSGVLTKDSSIIYQSPTGLFERSVRLTDL

SEQ ID NO: 1002 - protein, 566 aa, Lactobacillus casei
MQILTDEVLKQKIAELNAHELKASGIYAAIDDAYTSPSNKKALRQVLSVIDDITNAAGQAPNWLYIETADGDGVPGKRTNSRQRKIQEIYVNAAQELITSSVRGELEDKIASRADFTDRLVLYFMQGGRDIYTGEPLNIDNLSSYDIDHILPQSLIKDNSLDNRVLVHPLVNREKDTIFASTRFAKQMNGMWRQWHAAGLISSRKLRNLQMRPDEIDKYASGFVARQLVETRQIIKLTEQIVADQYPDAKIIAVKAGLSSQLRKELDFPKNREVNHYHHAFDAFLAARIGTYLLKRYPNLEPFFTYGKFKKTEVKKLKSFNFIRDMTHAKDKIVAKETGEIVWDNASDINELDRIYNFKRMLITHEVRFETASLFKQTLYAAKNSKNRGGSRQLIPKKKGYLVDIYGGYTQETGSYLSVVRLTKKAMYAVVKVSTRDAAKLAVAKSISEQKENETLKKIIDGKLSKTSKKGKTTHQLFEIVLPRVGQKTLFKNSKYNQFLVNSDTYMHNYQELWMPREYQRMWKDILLSNHGDAQLEGQLDQIFKFIVSQVNSYFNLYDINQFRKK

SEQ ID NO: 1003 - protein, 1363 aa, Lactobacillus casei
MTKLGKPYGIGVDIGSNSIGFAAVDENSHLIRLKGKTVIGARLFEEGKAAADRRASRTTRRRLSRNRWRLSFLRDFFESHITPTDPNFFMRQKYSEISPKDKARYKYEKRLFNDRTDAEFYQQYPTMYHLRNRLLTDPSKADVREIYFAIHHILKSRGHFLTSGYAKDFNTNKVALNEIFPALQDAYAQVYPDLDITFDENKVNEFKTVLLDEKATPSDTQRALVNLLLAEDGDKDILKQQKQVLTEFAKAVVGLKMKLNVALGTEVDSSEATAWNFSLGQLDDKWAGIESAMTDEGTEILDQIRDLYRARLLNGIVPAGKTLSQAKVDDYEQHHEDLELFKDYLKQLEDDGMAKVIRQLYDRYIDGDDAKPFVREDFVKALTKEVTAHPNAKSPELLERLVQPDFMLKQRNKANGAIPVQMQQRELDQIIKNQSVYYDWLAAPNPVEKHRQSMPYQLDELLNFRIPYYVGPLVTAKEQKAAQGGVFAWMVRKDPDGNITPYNFDEKVDREASANTFIQRMKTTDTYLIGEDVLPKQSLLYQSYEVLNELNNVRVNDNKLSFDQKQQVLGELFERHNTVTIKQFVDNLLAHGDYDRIPEVRGLADEKRFLSSLSTYNQLKGILHEAIDDSDKQTDIEKIIAWSTIFEDKAIFKTKLNEISWLTAGMINSLANIRYRGWGQFSHKLLNELTLSTGRTVFEELLISSHNLMQILTDEVLKQKIAELNAHELKASGIYAAIDDAYTSPSNKKALRQVLSVIDDITNAAGQAPNWLYIETADGDGVPGKRTNSRQRKIQEIYANAAQELITGSVRGELEDKIASRADFTDRLVLYFMQGGRDIYTGEPLNIDNLSSYDIDHILPQSLIKDNSLDNRVLVHPLVNREKDTIFASTRFAKQMNGMWRQWHAAGLISSRKLRNLQMRPDEIDKYASGFVARQLVETRQIIKLTEQIVADQYPDAKIIAVKAGLSSQLRKELDFPKNREVNHYHHAFDAFLAARIGTYLLKRYPNLEPFFTYGKFKKTEVKKLKSLKSFNFIRDMTHAKDKIVAKETGEIVWDNASDINELDRIYNFKRMLITHEVRFETASLFKQTLYAAKNSKNRGGSRQLIPKKKGYLVDIYGGYTQETGSYLSVVRLTKKAMYAVVKVSTRDAAKLAVAKSISEQKENETLKKIIDGKLSKTSKKGKTTHQLFEIVLPRVGQKTLFKNSKYNQFLVNSDTYMHNYQELWMPREYQRMWKDILLSNHGDAQLEGQLDQIFKFIVSQVNSYFNLYDINQFRKKIADATDKFAKLPTHDTDNARGKIATIGQLLIGLQANAMRSDLRNLDIKTPFGLLQIGTGITLDLDTSIIYQSPTGLFEREVPLTDL

SEQ ID NO: 1004 - protein, 1360 aa, Lactobacillus casei
MTKLGKPYGIGVDIGSNSIGFAAVDENSHLIRLKGKTVIGARLFEEGKAAADRRASRTTRRRLSRNRWRLSFLRDFFESHITPTDPNFFMRQKYSEISPKDKARYKYEKRLFNDRTDAEFYQQYPTMYHLRTRLLTDPSKADVREIYFAIHHILKSRGHFLTPGYAKDFNTNKVALNEIFPALQDAYAQVYPDLDITFDENKVNEFKTVLLNEKATPSDTQRALVNLLLAEDGDKDILKQQKQVLTEFAKAVVGLKTKLNVALGTEVDSSEATVWNFSLGQLDDKWAGIESAMTDEGTEILDQIRDLYRARLLNGIVPAGKTLSQAKVDDYAQHHEDLELFKDYLKQLEDDGTAKAIRQLYDRYIDGDDAKPFVREDFVKALTKEVTAHPNAKSPELLERLAQPDFMLKQRNKANGAIPVQMQQRELDQIIKNQSVYYDWLAAPNPVEKHRKSMPYQLDELLNFRIPYYVGPLVTAKEQKAAQGGVFAWMVRKDPDGNITPYNFDEKVDREASANTFIQRMKTTDTYLIGEDVLPKQSLLYQSYEVLNELNNVRVNDNKLSFDQKQQVLGELFERHNTVTIKQFVDNLLAHGDYDRIPEVRGLADEKRFLSSLSTYNQLKGILHEAIDDADKQTDIENIIAWSTIFEDKAIFKTKLNEISWLNAGMINSLANIRYRGWGQFSHKLLNELTLSTGRTVFEELLISSRNLMQILTDEVLKQKIAELNAHELKASGIYAAIDDAYTSPSNKKALRQVLSVIDDITNAAGQAPNWLYIETADGDGVPGKRTNSRQRKIQEIYANAAQELITGSVRGELEDKIASRADFTDRLVLYFMQGGRDIYTGEPLNIDNLSSYDIDHILPQSLIKDNSLDNRVLVHPLVNREKDTIFASTRFAKQMNGMWRQWHAAGLISSRKLRNLQMRPDEIDKYASGFVARQLVETRQIIKLTEQIVADQYPDTKIIAVKAGLSSQLRKELDFPKNREVNHYHHAFDAFLAARIGTYLLKRYPNLEPFFTYGKFKKTEVKKLKSFNFIRDMTHAKDKIVAKETGEIVWDNASDINELDRIYNFKRMLITHEVRFETASLFKQTLYAAKNSKNRGGSRQLIPKKKGYLVDIYGGYTQETGSYLSVVRLTKKAMYAVVKVSTRDAAKLAVAKSISEQKENETLKKIIDGKLSKTSKKGKTTHQLFEIVLPRVGQKTLFKNSKYNQFLVNSDTYMHNYQELWMPREYQRMWKDILLSNHGDAQLEGQLDQIFKFIVSQVNSYFNLYDINQFRKKIADATDKFAKLPTHDTDNARGKIATIGQLLIGLQANAMRSDLRNLDIKTPFGLLQIGTGITLDLDTSIIYQSPTGLFEREVPLTDL

SEQ ID NO: 1005 - protein, 700 aa, Lactobacillus casei
MTKLGKPYGIGVDIGSNSIGFAAVDENSHLIRLKGKTVIGARLFEEGKAAADRRASRTTRRRLSRNRWRLSFLRDFFESHITPTDPNFFMRQKYSEISPKDKARYKYEKRLFNDRTDAEFYQQYPTMYHLRTRLLTDPSKADVREIYFAIHHILKSRGHFLTSGYAKDFNTNKVALNEIFPALQDAYAQVYPDLDITFDENKVNEFKTVLLDEKATPSDTQRALVNLLLAEDGDKDILKQQKQVLTEFAKAVVGLKTKLNVALGTEVDSSEATAWNFSLGQLDDKWAGIESAMTDEGTEILDQIRDLYRARLLNGIVPAGKTLSQAKVDDYEQHHEDLELFKDYLKQLEDDGMAKAIRQLYDRYIDGDDAKPFVREDFVKALTKEVTAHPNAKSPELLERLVQPDFMLKQRNKANGAIPVQMQQRELDQIIKNQSVYYDWLAAPNPVEKHRQSMPYQLDELLNFRIPYYVGPLVTAKEQKAAQGGVFAWMVRKDPDGNITPYNFDEKVDREASANTFIQRMKTTDTYLIGEDVLPKQSLLYQSYEVLNELNNVRVNDNKLSFDQKQQVLGELFERHNTVTIKQFVDNLLAHGDYDRIPEVRGLADEKRFLSSLSTYNQLKGILHEAIDDSDKQTDIEKIIAWSTIFEDKAIFKTKLNEISWLNAGMINSLANIRYRGWGQFSHKLLNELTLSTGRTVFEA

SEQ ID NO: 1006 - protein, 330 aa, Lactobacillus casei
MTKLGKPYGIGVDIGSNSIGFAAVDENSHLIRLKGKTVIGARLFEEGKAAADRRASRTTRRRLSRNRWRLSFLRDFFESHITPTDPNFFMRQKYSEISPKDKNRYKYEKRLFNDRTDAEFYQQYPTMYHLRNRLLTDPSKADVREIYFAIHHILKSRGHFLTPGDAKDFNTNKVALNEIFPALQDAYAQVYPDLDITFDENKMNEFKTVLLNEKATPSDTQRALVNLLLAEDGDKDILKQQKQVLTEFAKAVVGLKTKLNVALGTEVDSSEATAWNFSLGQLDDKWAGIESAMTDEGTEILDQIRDLYRARLLNGIVPAGKTLSQAKVDD

SEQ ID NO: 1007 - protein, 330 aa, Lactobacillus casei
MTKLGKPYGIGVDIGSNSIGFAAVDENSHLIRLKGKTVIGARLFEEGKAAADRRASRTTRRRLSRNRWRLSFLRDFFESHITPTDPNFFMRQKYSEISPKDKNRYKYEKRLFNDRTDAEFYQQYPTMYHLRNRLLTDPSKADVREIYFAIHHILKSRGHFLTPGDAKDFNTNKVALNEIFPALQDAYAQVYPDLDITFDENKMNEFKTVLLNEKATPSDTQRALVNLLLAEDGDKDILKQQKQVLTEFAKAVVGLKTKLNVALGTEVDSSEATAWNFSLGQLDDKWAGIESAMTDEGTEILDQIRDLYRARLLNGIVPAGKTLSHAKVDD

SEQ ID NO: 1008 - protein, 1361 aa, Lactobacillus casei
MTKLGKPYGIGVDIGSNSIGFAAVDENSHLIRLKGKTVIGARLFEEGKAAADRRASRTTRRRLSRNRWRLSFLRDFFESHITPTGPNFFMRQKYSEISPKDKARYKYEKRLFNDRTDAEFYQQYPTMYHLRNRLLTDPSKADVREIYFAIHHILKSRGHFLTSGYAKDFNTNKVALNEIFPALQDAYAQVYPDLDITFDENKVNEFKTVLLNEKATPSDTQRALVNLLLAEDGDKDILKQQKQVLTEFAKAVVGLKTKLNVALGTEVDSSEATVWNFSLGQLDDKWAGIESAMTDEGTEILDQIRDLYRARLLNGIVPAGNTLSQAKVDDYAQHHEDLELFKDYLKQLEDDGTAKAIRQLYDRYIDGDDAKPFVREDFVKALTKEVTAHPNAKSPELLERLAQPDFMLKQRNKANGAIPVQMQQRELDQIIKNQSVYYDWLAAPNPVEKHRKSMPYQLDELLNFRIPYYVGPLVTAKEQKAAQGGVFAWMVRKDPDGNITPYNFDEKVDREASANTFIQRMKTTDTYLIGEDVLPKQSLLYQRYEVLNELNNVRVNNEKLSIEQKQQVIRELFERHNSVTIKQFAENLRAHGDYAHIPEIRGLADEKRFLSSLSTYRQLKSLLPDAIDDPAKQADIENIIAWSTVFEDAAIFKTKLKEINWLDSQTITKLSNIRYRGWGQFSHKFLNGLTLGNGHTIIQELFLSNNNLMQILTDETLQKKMTELNADKLKAANINDAIDDAYTSPSNKKALRQVLRVIEDIKRAADGQDPSWLYVETADGGGTPGKRTRARQHQLQEIYANAAHELIDSAVRGELEDKIADKADFNDRLVLYFMQGGRDIYTGTPLNIDQLSSYDIDHILPQSLIKDNSLDNRVLVHAIINREKNATFASTIYAQKMNATWRQWHEAGLISGRKLRNLQMRPDQIDKYASGFVARQLVETRQIIKLTEQIVAAQYPETKIIAVKAGLSHQLREELEFPKNRDVNHYHHAFDAFLAARIGTYLLKRFPNLQAFFTYGKFKKADVKKLRGFNFIRDITHAEDKIVVKDTGEVIWDKKRDVDELDRIYNFKRMLITHEVHFEKADLFKQTVYGAKDSKEAGGKKQLISKKKGYPVDIYGGYTQETGSYLSVVRLTKKAMYAVVKVSTRDAAKLAVAKSISEQKENETLNDIIDEKLSKISKNGKITHELFEVVLPRVGQKTLFKNSKYNLFLVNSDTYMHNYQELWMPREYQKMWKDISLSKYGDAQTEDQLDQIFGFIVSQVNSYFNLYDINQFRKKLNDAADKFATLPMRDTDDMQGKIATIGQLLIGLQANAARSDLRNLDIKTPLGLLQIPNGISLDSDTSVVYQSPTGLLEREVHLSDL

SEQ ID NO: 1009 - protein, 1128 aa, Lactobacillus casei
MTKLGKPYGIGVDIGSNSIGFAAVDENSHLIRLKGKTVIGARLFEEGKAAAKRRAGRTTRRRLSRNRWRLSFLRDFFESHITPTDPNFFMRQKYSEISPKDKARYKYEKRLFNDRTDAEFYQQYSTMYHLRNRLMTDPSRADVREIYFAIHHILKSRGHFLTPGDAKDFNTNDVALDEIFPALQDAYAQVYPDLGITFDEDKANEFKTILLNEIATSIDTQRALVKLLLAEEDDKDILKQQKQVLTEFAKAVVGLKTKLNLALGTEVDSSEATAWNFSLGQLDDKWAGIESAMTDEGTEILDQIRDLYRARLLNGIVPTGKTLSQAKVDDYTQHHEDLQLFKAYLKQLEDDGTAKAIRQLYDRYIDGDDAAPFLRENFVKALTKDVTAHPNTKSPELLERLAQPDFMLKQRNKANGAIPVQMQQRELDQIIKNQAVYYDWLAAPNPVEKHRKSMPYQLDELLNFRIPYYVGPLVTAKEQKAAQGGVFAWMVRKDPEGNITPYNFDEKVDREASANTFIQRMKTTDTYLIGEDVLPKQSLLYQRYEVLNELNNVRVNNEKLSIEQKQQVIRELFERHNSVTIKQFAENLRAHGDYAHIPEIRGLADEKRFLSSLSTYRQLKSLLPEAIDDPAKQADIENIIAWSTVFEDAAIFKTKLKEISWLGSEAITKLSNIRYRGWGQFSRKFLNGLTLGNGHTIIQELLLSTNNLMQILTDETLQKKMTELNADKLKTANINDAIDNAYTSPSNKKALRQVLRVVDDIKRAADGQDPSWLYVETADGGGTPGKRTRARQHQLQEIYANAAHELIDTAVRGELEDKISDKADFNDRLVLYFMQGGRDIYTGAPLNIDQLSSYDIDHILPQSLIKDNSLDNRVLVHAIINREKNATFASTIYAQKMNATWRQWHEAGLISGRKLRNLQMRPDQIDKYASGFVARQLVETRQIIKLTEQIVAAQYPDTKIIAVKAGLSHQLREELEFPKNRDVNHYHHAFDAFLAARIGTYLLKRFPNLQAFFTYGKFTKADVKKLRGFNFIRDITHAEDKIVAKDTGEVVWDKQRDVDELDRIYNFKRMLITHEVRFETADLFKQTVYGARDSKEAGGSKQLIPKKKDIQLIFMGAISERTRPILPL

SEQ ID NO: 1010 - protein, 1366 aa, Lactobacillus casei
MTKLGKPYGIGVDIGSNSIGFAAVDENSHLIRLKGKTVIGARLFEEGKAAAYRRASRTTRRRLSRNRWRLSFLRDFFESHITPTDPNFFMRQKYSEISPKDKARYKYEKRLFNDRTDAEFYQQYPTMYHLRTRLLTDPSKADVREIYFAIHHILKSRGHFLTPGYAKDFNTNKVALNEIFPALQDAYAQVYPDLDITFDENKVNEFKTVLLNEKATPSDTQRALVNLLLAKEGDRDILKQQKQVLTEFAKAVVGLKTKLNVALGTEVDSSEATAWNFSLGQLDDKWAGIESAMTDEGTEILDQIRDLYRARLLNGIVPAGKTLSQAKVDDYAQHHEDLELFKDYLKQLEDDGTAKAIRQLYDRYIDGDDAKPFVREDFVKALTKEVTAHPNAKSPELLERLAQPDFMLKQRNKANGAIPVQMQQRELDQIIKNQAVYYDWLAAPNPVEKHRQSMTYQLDELLNFRIPYYVGPLVTAKEQKAAQGGVFAWMVRKDPDGNITPYNFDEKVDREASANTFIQRMKTTDTYLIGEDVLPKQSLLYQSYEVLNELNNVRVNDNKLSFDQKQQVLGELFERHNTVTIKQFVDNLLAHGDYDRIPEVRGLADEKRFLSSLSTYNQLKGILHEAIDDADKQTDIENIIAWSTIFEDKAIFKTKLNEISWLNAGMINSLANIRYRGWGQFSHKLLNELTLSTGRTVFEELLISSRNLMQILTDEVLKQKIAELNAHELKASGIYAAIDDAYTSPSNKKALRQVLSVIDDITNAAGQAPNWLYIETADGDGVPGKRTNSRQRKIQEIYANAAQELITGSVRGEFEDKIASRADFTDRLVLYFMQGGRDIYTGEPLNIDNLSSYDIDHILPQSLIKDNSLDNRVLVHPLVNREKDTIFASTRFAKQMNGMWRQWHAAGLISSRKLRNLQMRPDEIDKYASGFVARQLVETRQIIKLTEQIVADQYPDTKIIAVKAGLSSQLRKELDFPKNREVNHYHHAFDAFLAARIGTYLLKRYPNLEPFFTYGKFKKTEVKKLKSLKSLKSFNFIRDMTHAKDKIVAKETGEIVWDNASDINELDRIYNFKRMLITHEVRFETASLFKQTLYAAKNSKNRGGSRQLIPKKKGYLVDIYGGYTQETGSYLSVVRLTKKAMYAVVKVSTRDAAKLAVAKSISEQKENETLKKIIDGKLSKTSKKGKTTHQLFEIVLPRVGQKTLFKNSKYNQFLVNSDTYMHNYQELWMPREYQRMWKDILLSNHGDAQIEGQLDQIFKFIVSQVNSYFNLYDINQFRKKIADATDKFAKLPTHDTDNARGKIATIGQLLIGLQANAMRSDLRNLDIKTPFGLLQIGTGITLDLDTSIIYQSPTGLFEREVPLTDL

SEQ ID NO: 1011 - protein, 1354 aa, Lactobacillus coryniformis
MTLHYNVGLDIGTNSVGYTIVDDNGKILQVKGKNGYGVRVFKEGATAAERRIFRTTHRRLKRRKWRLRLLQDFFEPYILPQDDGFFIRRKESNLVLNDRDEDTASLFNDRSDRDFYQAYPTIYHLRQALMTEKRQFDVREIYLAMHHIIKYRGHFLLNGTVNNFTNNKIDLHSDFEELNALLLNVIPELKFQIDLDHSTMFQTTLLNTTISRSGRQRDLVKSFYNGSDDKQLAKQQKSVATELLKAILGLKAKFHKLFNLDLLETTEWEFSFDAEDIDDKLAKLEPLMTENQQQVMDILQRIFAAITLNGIVPEGKTLSASKVDSYQKHKQDLKLLKAIAQHSDKKTATVLQTAYNEYINGIASKPLKQEDFYKRLTNAVKKSSDPQVADMLALIDQEKFLPKQRTKENGAIPHQLHQLELERIIDNQKDYYPWLAELNPNQARQKVAKYKLSELVAFRVPYYVGPLIEPEVQQATSNAHFAWMARKEAGPITPWNFDQKVDRNVSAERFIKRMTTKDTYLLAEDVLPLHSLLYQRFIVLNELNNVRVNGQKLTKKQKQAVYQDLFKRQPHVTKKQFKSYLVQTGEFAESSKIEGLANETSFNSGLTTENELRKIFGAQLDEARYQVDFEQIIEWATLFEDAKILRTKLAEITWLTTEQIEKLAGIRYRGWGRFSRKLLAGLRDQNGQQIIDLLWDTPNNFMVIVSQAAFSEAITKENEKLIDRRGAQDVITDLYTSPQNKKALRQVLAIVADVQKAMGGVPPQRIFIEFAREDEKNPRRSVERSRQLEKLYQTISNEFLINSEVRQELKEAVDQKVNFKDRLFLYFLQGGVDLYSGKRINIDQLSHYDIDHILPQSFIKDDSLDNRVLVSQKLNRSKSDSVPLSEFANYKFGPAMQAKWLQLKEAGLLSKRKYDNLTLDPTKLSKFAPLGFVNRQLVETRQVIKLAANLLASEETKVVTIKANMTHQVRKELDFPKNRNVNNYHHAFDAYLTAFVGIFLSKRYPKLKPYFTYGDFQKGNKLPDLKNFNFLYELKNKDRSIDSNTGEIIWDKQRDLAYMNKIYNFKKVTVVHEVLTKSGALYNQTLYKASEDKASGRGTKQLIRKKDNMPTELYGGYTGSTSAFMSIVRLWKKDKPYYKVVGIPTRMAAKLANQAQLLDYLTKKFTTRKLVKKTGDYKTTVERFELVVPKVGFNQLVIDGGQPFMLGSATYQYNARELFISKEAVKALNKQLSTHVDLVQVFDEILVQVNRWFPLYDTNGFREKLSHGRDRFMKLNDSFEEKSDTQIDVLNRILIGFHANAARTNLKILGLGTDLGFMTQQAGIRLTEKAILVHQSPSGLFERKVALRDLKGLR

SEQ ID NO: 1012 - protein, 544 aa, Lactobacillus crispatus
KYYLYFMQLGRDAYTGKPINIDEVSQYYDIDHILPQSFIKDDSLNNRVLVAKPINNGKSDGVPLKLFGDNLATGLGITVKQMWNNWADKGLINKAKQNNLFLDPENINKHQASGFIRKQLVETSQIIKLATTILQAEYPKTKIIVVKASSNHYLRNEFDLYKSREVNDYHHAIDAYLTTICGNLLYQAYPKLRPFFVYGQFKKFSSDPKKENEILKKTKNFDFVAKLLGSKAPNEIRSQQGKVLFEKNKIRLQLNKAYNYKYMLVSRDTTTKNQEMFGMTIYPRAERDIAKSRKLIEKRKGFSTDIYGGYTGTAAAYMAIVRINKTKSSQYKVIAVPMTKRAILNKAEKEGNYEKILKQILSPSILYNDKGKRKAGVISFDIIKGKVPYNQVVQDGNKKFLLKSAIYLCNAKQLVLSEEAMRVITGHWLDSDKQDQELLDVYDEILEKIDRYLPLFDIRDFRNKLHKGREKFLKLNAEDKFKAIIQILKGLHDNSDTGELKDIGITVPFGQLQNNSGITLSSDTILVYQSPTGLFEKRVKISSL

SEQ ID NO: 1013 - protein, 298 aa, Lactobacillus crispatus
MDELNKISVNGKKLSVSVKQELYEDLFKKNNTVSAKQLKNWLIENQKLPYIKIKGLADQTKFNSSLSTYIKLKKSGLFVDKLDSNEFRDDFEKIIEWSTIFEDKQIYIQKLQTIDWLTAKQIQFLQNIRLQGWGRLSKKLLTAIVDSNGQNIIEQLWNSQQIFMSIVNKADIKGTITDANQDLMHSNSMEDILSEAYTSPANKKMIRQVVKVVHDIQKAASGQAPKQIAIEFARESRRNSKLSQTRGHKLQDIYQKISGDIVNKNLKDKLAEYIKNNQLSVWEKTSFQMNKNDQDFLF

SEQ ID NO: 1014 - protein, 279 aa, Lactobacillus crispatus
MNGKKLSVSVKQELYEDLFKKNNTVSAKQLKNWLIENQKLPYIKIKGLADQTKFNSSLSTYIKLKKSGLFVDKLDSNEFRDDFEKIIEWSTIFEDKQIYIQKLQTIDWLTAKQIQFLQNIRLQGWGRLSKKLLTAIVDSNGQNIIEQLWNSQQIFMSIVNKADIKGTITDANQDLMHSNSMEDILSEAYTSPANKKMIRQVVKVVHDIQKAASGQAPKQIAIEFARESRRNSKLSQTRGHKLQDIYQKISGDIVNKNLKDKLAEYIKNNQLNKDKYYTR

SEQ ID NO: 1015 - protein, 538 aa, Lactobacillus crispatus
MQLGRDAYTGKPINIDEVSQYYDIDHILPQSFIKDDSLNNRVLVAKPINNGKSDGVPLKLFGDNLATGLGITVKQMWNNWADKGLINKAKQNNLFLDPENINKHQASGFIRKQLVETSQIIKLATTILQAEYPKTKIIVVKASSNHYLRNEFDLYKSREVNDYHHAIDAYLTTICGNLLYQAYPKLRPFFVYGQFKKFSSDPKKENEILKKTKNFDFVAKLLGSKAPNEIRSQQGKVLFEKNKIRLQLNKAYNYKYMLVSRDTTTKNQEMFGMTIYPRAERDIAKSRKLIEKRKGFSTDIYGGYTGTAAAYMAIVRINKTKSSQYKVIAVPMTKRAILNKAEKEGNYEKILKQILSPSILYNDKGKRKAGVISFDIIKGKVPYNQVVQDGNKKFLLKSAIYLCNAKQLVLSEEAMRVITGHWLDSDKQDQELLDVYDEILEKIDRYLPLFDIRDFRNKLHKGREKFLKLNAEDKFKAIIQILKGLHDNSDTGELKDIGITVPFGQLQNNSGITLSSDTILVYQSPTGLFEKRVKISSL

SEQ ID NO: 1016 - protein, 206 aa, Lactobacillus crispatus
MQLGRDAYTGKPINIDEVSQYYDIDHILPQSFIKDDSLNNRVLVAKPINNGKSDGVPLKLFGDNLATGLGITVKQMWNNWADKGLINKAKQNNLFLDPENINKHQASGFIRKQLVETSQIIKLATTILQAEYPKTKIIVVKASSNHYLRNEFDLYKSREVNDYHHAIDAYLTTICGNLLYQAYPKLRPFFVYGQFKKFSSDPKKRK

SEQ ID NO: 1017 - protein, 857 aa, Lactobacillus crispatus
MTKLNNEYMVGLDIGTNSCGWVATDFDNNILKMHGKRALGSHLFDEGVSAADRRAFRTTRRRIKRRKWRLKLLEEIFDEEMAKVDPNFFARLKESGLSPLDTRKNVSSIVFPTKKMDKQFYKKFPTIYHLRNALMKQDKKFDLRAIYIAIHHIVKYRGNFLSNSSISNFSASKIEIDRFVNELNDLYSIFLPESGVIFDAGNASKVEDIIRNEQMFKLDKIKEIADVLPDTENKSGLKLSKKISKEISKAILGYKAKFEIILQVNVDKTDSSIWNFKLNDENADVNLSEITSDLTDTQLQILDLVRNLFSAISLLNIVDEGSTLSESMIRKYNDHAQDLKLLKTVIKNHSDRKKAHNLQLAYDKYVNNRHFVDVETKKAFPNKHLYRKSDFYEIVKKNLDASKEAVQIRKEIALDKFMPKQRSDENGVIPFQLNQIELDKIIENQGKYYPFLKEINPIKAHRMQAPYKLDELIRFRVPYYVGPMIEPTNSSYPQTRQNQSFAWMVRKAKGRITPWNFDEKVDRQKSANNFIKRLTTKDTYLFGEDVLPANSLLYQKYTVLDELNKISVNGKKLSVSVKQELYEDLFKKNNTVSAKQLKNWLIENQKLPYIKIKGLADQTKFNSSLSTYIKLKKSGLFVDKLDSNEFRDDFEKIIEWSTIFEDKQIYIQKLQTIDWLTAKQIQFLQNIRLQGWGRLSKKLLTAIVDSNGQNIIEQLWNSQQIFMSIVNKADIKGTITDANQDLMHSNSMEDILSEAYTSPANKKMIRQVVKVVHDIQKAASGQAPKQIAIEFARESRRNSKLSQTRGHKLQDIYQKISGDIVNKNLKDKLAEYIKNNQLSVWEKTSFQMNKNDQDFLF

SEQ ID NO: 1018 - protein, 857 aa, Lactobacillus crispatus
MTKLNNEYMVGLDIGTNSCGWVATDFDNNILKMHGKRALGSHLFDEGVSAADRRAFRTTRRRIKRRKWRLKLLEEIFDEEMAKVDPNFFARLKESGLSPLDTRKNVSSIVFPTKKMDKQFYKKFPTIYHLRNALMKQDKKFDLRAIYIAIHHIVKYRGNFLSNSSISNFSASKIEIDRFVNELNDLYSIFLPESGVIFDAGNASKVEDIIRNEQMFKLDKIKEIADVLPDTENKSGLKLSKKISKEISKAILGYKAKFEIILQVNVDKTDSSIWNFKLNDENADVNLSEITSDLTDTQLQILDLVRNLFSAISLLNIVDEGSTLSESMIRKYNDHAQDLKLLKTVIKNHSDRKKAHNLQLAYDKYVNNRHFVDVETKKAFPNKHLYRKSDFYEIVKKNLDASKEAVQIRKEIALDKFMPKQRSDENGVIPFQLNQIELDKIIENQGKYYPFLKEINPIKAHRMQAPYKLDELIRFRVPYYVGPMIEPTNSSYPQTRQNQSFAWMVRKAKGRITPWNFDEKVDRQKSANNFIKRLTTKDTYLFGEDVLPANSLLYQKYTVLDELNKISVNGKKLSVSVKQELYEDLFKKNNTVSAKQLKNWLIENQKLPYIKIKGLADQTKFNSSLSTYIKLKKSGLFVDKLDSNEFRDDFEKIIEWSTIFEDKQIYIQKLQTIDWLTAKQIQFLQNIRLQGWGRLSKKLLTAIVDSNGQNIIEQLWNSQQIFMSIVNKADIKGTITDANQDLMHSNSMEDILSEAYTSPANKKMIRQVVKVVHDIQKAASGQAPKQIAIEFARESRRNSKLSQTRGHKLQDIYQKISGDIVNKNLKDKLAEYIKNNQLSVWEKNSFQMNKNDQDFLF

SEQ ID NO: 1019 - protein, 347 aa, Lactobacillus crispatus
MVNLKSLVLILKKENEILKKTKNFDFVAKLLGSKAPNEIRSQQGKVLFEKNKIRLQLNKAYNYKYMLVSRDTTTKNQEMFGMTIYPRAERDIAKSRKLIEKRKGFSTDIYGGYTGTAAAYMAIVRINKTKSSQYKVIAVPMTKRAILNKAEKEGNYEKILKQILSPSILYNDKGKRKAGVISFDIIKGKVPYNQVVQDGNKKFLLKSAIYLCNAKQLVLSEEAMRVITGHWLDSDKQDQELLDVYDEILEKIDRYLPLFDIRDFRNKLHKGREKFLKLNAEDKFKAIIQILKGLHDNSDTGELKDIGITVPFGQLQNNSGITLSSDTILVYQSPTGLFEKRVKISSL

SEQ ID NO: 1020 - protein, 534 aa, Lactobacillus crispatus
RDAYTDKPINIDEVSQYYDIDHILPQSFIKDDSLNNRVLVAKPINNGKSDGVPLKLFGDNLATGLGITVKQMWNNWADKGLINKAKQNNLFLDPENINKHQASGFIRKQLVETSQIIKLATTILQAEYPKTKIIVVKASSNHYLRNEFDLYKSREVNDYHHAIDAYLTTICGNLLYQAYPKLRPFFVYGQFKKFSSDPKKENEILKKTKNFDFVAKLLGSKAPNEIRSQQGKVLFEKNKIRLQLNKAYNYKYMLVSRDTTTKNQEMFGMTIYPRAERDIAKSRKLIEKRKGFSTDIYGGYTGTAAAYMAIVRINKTKSSQYKVIAVPMTKRAILNKAEKEGNYEKILKQILSPSILYNDKGKRKAGVISFDIIKGKVPYNQVVQDGNKKFLLKSAIYLCNAKQLVLSEEAMRVITGHWLDSDKQDQELLDVYDEILEKIDRYLPLFDIRDFRNKLHKGREKFLKLNAEDKFKAIIQILKGLHDNSDTGELKDIGITVPFGQLQNNSGITLSSDTILVYQSPTGLFEKRVKISSL

SEQ ID NO: 1021 - protein, 278 aa, Lactobacillus crispatus
SVNGKKLSVSVKQELYEDLFKKNNTVSAKQLKNWLIENQKLPYIKIKGLADQTKFNSSLSTYIKLKKSGLFVDKLDSNEFRDDFEKIIEWSTIFEDKQIYIQKLQTIDWLTAKQIQFLQNIRLQGWGRLSKKLLTAIVDSNGQNIIEQLWNSQQIFMSIVNKADIKGTITDANQDLMHSNSMEDILSEAYTSPANKKMIRQVVKVVHDIQKAASGQAPKQIAIEFARESRRNSKLSQTRGHKLQDIYQKISGDIVNKNLKDKLAEYIKNNQLNKDKYY

SEQ ID NO: 1022 - protein, 277 aa, Lactobacillus crispatus
SVNGKKLSVSVKQELYEDLFKKNNTVSAKQLKNWLIENQKLPYIKIKGLADQTKFNSSLSTYIKLKKSGLFVDKLDSNEFRDDFEKIIEWSTIFEDKQIYIQKLQTIDWLTAKQIQFLQNIRLQGWGRLSKKLLTAIVDSNGQNIIEQLWNSQQIFMSIVNKADIKGTITDANQDLMHSNSMEDILSEAYTSPANKKMIRQVVKVVHDIQKAASGQAPKQIAIEFARESRRNSKLSQTRGHKLQDIYQKISGDIVNKNLKDKLAEYIKNNQLNKDKY

SEQ ID NO: 1023 - protein, 1368 aa, Lactobacillus curvatus
MSRPYNIGLDIGTSSIGWSVVDDQSKLVSVRGKYGYGVRLYDEGQTAAERRSFRTTRRRLKRRKWRLGLLREIFEPYITPIDDTFFLRQKQSNLSPKDQRKLYTQTSLFNDRTDRAFYDDYPTIYHLRYRLMTEKRQFDIREIYLAMHHIVKYRGHFLNEAPVSSFKSSEINLVAHFDRLNTIFADLFSESGFQLETDKLAEVKALLLDNQQSASNRQRQALSLIYTPSTNKAVEKQNKAIATELLKAILGLKAKFNVLTGIEAEDVKAWTLTFNAENFDEEMVKLESSLDDNAHQIIESLQELYSGVLLAGIVPENQSLSQAMITKYDDHQKHLKMLKAVREALAPGDRQRLKQAYDQYVDGQENTKAYSKEDFYGDITKALKNNPDHPIVSEIKKLIELDQFMPKQRTKDNGAIPHQLHQQELDRIIENQQQYYPWLAELNPNSKRQTVAKYKLDELVAFRVPYYVGPLITAEQQRQSSDAKFAWLIRKAEGRITPWNFDDKVDRQASANEFIKRMTTTDTYLLAEDVLPKQSLIYQRFEVLNELNGLKIDDQPITTELKQAIFTDLFMQKISVTVKNIQDYLVSEKRYASRPAITGLSDENKFNSRLSTYHDLKMIVGDAVDDVDKQADLEKCIEWSTIFEDGKIYSAKLNEIDWLTDQQRVQLAAKRYRGWGRLSAKLLTQIVNANGQRIMDLLWDTTDNFMRIVHSEDFDKLITEANQMMLAENDVQDVINDLYTSPQNKKALRQILLVVNDIQKAMKGQAPERILIEFAREDEVNSRLSVQRKRQVEQVYQNISNELLNNTEIRNELKDLSNSALSNTRLFLYFMQGGRDMYTGDSLNIDRLSTYDIDHILPQSFIKDNSLDNRVLVSQKMNRSKADQVPTDFTSVELGQKMQIQWEQMLRAGLITKKKYDNLTLNPDHISKYAMKGFINRQLVETRQVIKLATNLLMEQYGEDNIELITVKSGLTHQMRTEFDFPKNRNLNNHHHAFDAYLTAFVGLYLLKRYPKLKPYFVYGEYQKASQQDKWRNFNFLNGLKKDELVDENTEAVIWDKESGLAYLNKIYQFKKILVTRGVHENSGALFNQTLYAAKDDKASGQGGKQLIPAKQDRSTALYGGYSGKTVAYMCIVRIKNKKGDLYKVCGVETSWLAQLKQLTDEDSQKAFLEQKISPQFTKVKKQKGNIIEAVEEFEVIAPHILINQRFFDNGQELTLGSATYKHNEQELILDKTAVKLLNGALPLTQSEELAEQVYDEILDQVMHYFPLYDTNQFRAKLSTGKAAFMKLPWKSQWDGNKMVQVGQQVILDRILIGLHANAAMSDLKVLKMTTPFGMIQQSTGITLSADTQIIYQSPTGLFERRVALRDL

SEQ ID NO: 1024 - protein, 669 aa, Lactobacillus delbrueckii
MAKPKDYTIGLDIGTNSVGWVVTDDQNNILRIKGKKAIGARLFTEGKVAAERRSFRTTRRRLSRRRWRIKMLEELFDEEIAKVDPSFFARLHESWISPKDKRKRYSAIVFPSPEEDKKFHESYPTIYHLRDKLMKDDQKHDIREIYIAVHQMIKARGNFLHDESVETYRSGMSSLGGRSERNILSVQTLEELNDLFAENEGTEEVELNVASAEQINDILTGGHLNADSQKEISNLLLPSSFPSFDDKAKEKQVKKLINNVATNISKAWLGYKADFSTILNLAKVDKDQKKIFAFALQGGDEEDKVQELESLLEQSQTDIVDRLIEIRHAIVLSEIVPVGMTLSEAMIDKYDQHKEDLITLKAVIRNTKDKKKAAKLQAIYDLYVKKRHADLAKAMKLTGIKKRSELLDPEELKKGISSLLDDSPEAVEIKQRLEEKTFLPLQRSNNNGVIPNQLHQVELDEIIKKQSKYYPFLAEKNPDESEEAQKKAPTKLDALLTFRVPYYVGPMITKEEQEAQNGHSFAWMVRRDPQDHEAITPWNFEKKVDKMASATQFIKRMTTKDTYLLGEDVLPASSLKYQLFTVLNELNNLRVNGKKLTSDEKEQVIEGLFKKQKTVKADKFVKYWQAKHIGADIKVKGLSDPSKFNSTMSTYIDFKKIFGDQLNDVNRQR

SEQ ID NO: 1025 - protein, 544 aa, Lactobacillus delbrueckii
MTGCADYDVDHIMPQSFVKDDSLDNRVLVARAVNNQKSDKVPALLFGNKVVADLGITVREMWDKWQKLGMISKRKLSNLLTDPDALTEYRAQGFIRRQLVETSQVIKLTATILQSEFPDSKIIEVPAKYNSIVRKQFDLYKSREVNDFHHAIDAYLSTIVGNYLYQVYPNLRRMFVYGEFKKFSSNAEESAHDVARRVKSMNFLDDLLRGTHGDNIYCRSTGEIVFNRNDIISKLKQAYSFKQMLVTQEVFTKKSALFDQTVYPSPERDSKKRSGLIPRKKGMDTEIYGGYSGNKDAYFVLAEAVKEKGHTLQIVGVPIRALNTLKNSANYSEKLLEIIKPQVMFNKDTGKPIKGIKDVKILMDKIPCRQPVLEGESYYMLASSKYRYSLKQISLSQMSMKYILDYIDDPNFNKHEMINIDQQDEKECLLSVYDEILEKMDKYLPLFDIRSFRKKLHDGRDAFIALPVASEEKKPGEVDVIRKILKGLHANADITNLAELGFGTAALGALVSTGGIKISDDAVFIYQSPTGLFERRVKVSDLLK

SEQ ID NO: 1026 - protein, 1356 aa, Lactobacillus farciminis
MTKKEQPYNIGLDIGTSSVGWAVTNDNYDLLNIKKKNLWGVRLFEEAQTAKETRLNRSTRRRYRRRKNRINWLNEIFSEELAKTDPSFLIRLQNSWVSKKDPDRKRDKYNLFIDGPYTDKEYYREFPTIFHLRKELILNKDKADIRLIYLALHNILKYRGNFTYEHQKFNISNLNNNLSKELIELNQQLIKYDISFPDDCDWNHISDILIGRGNATQKSSNILKDFTLDKETKKLLKEVINLILGNVAHLNTIFKTSLTKDEEKLNFSGKDIESKLDDLDSILDDDQFTVLDAANRIYSTITLNEILNGESYFSMAKVNQYENHAIDLCKLRDMWHTTKNEEAVEQSRQAYDDYINKPKYGTKELYTSLKKFLKVALPTNLAKEAEEKISKGTYLVKPRNSENGVVPYQLNKIEMEKIIDNQSQYYPFLKENKEKLLSILSFRIPYYVGPLQSAEKNPFAWMERKSNGHARPWNFDEIVDREKSSNKFIRRMTVTDSYLVGEPVLPKNSLIYQRYEVLNELNNIRITENLKTNPIGSRLTVETKQRIYNELFKKYKKVTVKKLTKWLIAQGYYKNPILIGLSQKDEFNSTLTTYLDMKKIFGSSFMEDNKNYDQIEELIEWLTIFEDKQILNEKLHSSKYSYTPDQIKKISNMRYKGWGRLSKKILMDITTETNTPQLLQLSNYSILDLMWATNNNFISIMSNDKYDFKNYIENHNLNKNEDQNISDLVNDIHVSPALKRGITQSIKIVQEIVKFMGHAPKHIFIEVTRETKKSEITTSREKRIKRLQSKLLNKANDFKPQLREYLVPNKKIQEELKKHKNDLSSERIMLYFLQNGKSLYSEESLNINKLSDYQVDHILPRTYIPDDSLENKALVLAKENQRKADDLLLNSNVIDRNLERWTYMLNNNMIGLKKFKNLTRRVITDKDKLGFIHRQLVQTSQMVKGVANILDNMYKNQGTTCIQARANLSTAFRKALSGQDDTYHFKHPELVKNRNVNDFHHAQDAYLASFLGTYRLRRFPTNEMLLMNGEYNKFYGQVKELYSKKKKLPDSRKNGFIISPLVNGTTQYDRNTGEIIWNVGFRDKILKIFNYHQCNVTRKTEIKTGQFYDQTIYSPKNPKYKKLIAQKKDMDPNIYGGFSGDNKSSITIVKIDNNKIKPVAIPIRLINDLKDKKTLQNWLEENVKHKKSIQIIKNNVPIGQIIYSKKVGLLSLNSDREVANRQQLILPPEHSALLRLLQIPDEDLDQILAFYDKNILVEILQELITKMKKFYPFYKGEREFLIANIENFNQATTSEKVNSLEELITLLHANSTSAHLIFNNIEKKAFGRKTHGLTLNNTDFIYQSVTGLYETRIHIE

SEQ ID NO: 1027 - protein, 1313 aa, Lactobacillus fermentum
MHYLDEIFAPHLQEVDENFLRRLKQSNIHPEDPAKNQAFIGKLLFPDLLKKNERGYPTLIKMRDELPVEQRAHYPVTNIYKLREAMINEDRQFDLREVYLAVHHIMKYRGHFLNNASVDKFKVGRIDFYKSFNVLNEAYEELQNGEGSFTIEPSKVEKIGQLLLDTKMRKLNRQKAVAKLLEVKVADKEETKRNKQIATAMSKLVLGYKADFATVAMANGNEWKIDLSSETSEDEIEKFREELSDAQNDILTEITSLFSQIMLNEIVPNGMSISESMMDRYWTHERQLAEVKEYLATQPASARKEFDQVYNKYIGQAPKERGFDLEKGLKKILSKKENWKEIDELLKAGDFLPKQRTSANGVIPHQMHQQELDRIIEKQAKYYPWLATENPATGERDRHQAKYELDQLVSFRIPYYVGPLVTPEVQKATSGAKFAWAKRKEDGEITPWNLWDKIDRAESAEAFIKRMTVKDTYLLNEDVLPANSLLYQKYNVLNELNNVRVNGRRLSVGIKQDIYTELFKKKKTVKVSDVASLVMAKTRGVNKPSVEGLSDPKKFNSNLATYLDLKSIVGDKVDDNRYQTDLENIIEWRSVFEDGEIFADKLTEVEWLTDQQRSALVKKRYKGWGRLSKKLLTGIVDENGQRIIDLMWNTDQNFMQIVNQPVFKEQIDQLNQKAITNDGMTLREWVESVLDGAYTSPQNKKAIWQVVRVVEDIVKAVGNAPKSISIEFARNEGNKGEITRSRRTQLQKLFEDQAHELVKDTSLTEELEKAPDLSDRYYLYFTQGGKDMYTGDPINFDEISTKYDIDHILPQSFVKDDSLDNRVLVSRAENNKKSDRVPAKLYAAKMKPYWNQLLKQGLITQRKFENLTMDVDQNIKYRSLGFVKRQLVETRQVIKLTANILGSMYQEAGTDIIETRAGLTKQLREEFDLPKVREVNDYHHAVDAYLTTFAGQYLNRRYPKLRSFFVYGEYMKFKHGSDLKLRNFNFFHELMEGDKSQGKVVDQQTGELITTRDEVAKSFDRLLNMKYMLVSKEVHDRSDQLYGATIVTAKESGKLTSPIEIKKKRPVDLYGAYTNGTSAFMTIIKFTGNKPKYKVIGVPTTSAVGLKRVGKPGSESYNQELHRIIKSNPKVKKDFEIVVPHVSYSQLIVDDDCKFTLASDTYQHPATQLVLSKESMEIIADDFKFVKENTATADEQLVRVFDEIVNQMNHYFTIFDQRSNRQKVTKARDKFVSLPTESEYEGAKKTQVGKTEVITNLLMGLHANSAQGDLKVLGLSTFGFFQSSGGLNLSEDAMIVYQSPTGLFERRICLKDI

SEQ ID NO: 1028 - protein, 1327 aa, Lactobacillus florum
MTEQQQPYNIGLDIGTSSIGWAVTDQNDKLLHIRGHNGIGVRLFKEGESAAERRGFRTTRRRLSRRRWRLRFLDRIFDAELAKVDPNFLARLKQSNISPLDPNKQMFGNILFDDPQFDDQKFHQQYPTIYHLRSALAQPDAPQADVRLIYLALHHMIKFRGHFLNGAAVEKFHGGQLHLESEFQELNQIFSNQQRDHVQLQTSSLDEVATILKDNQRTPSDRQRELSARLFVPVDKTIDKENKKLATELLKAVLGLKAKFDVILGVEATDPQAFKLQFSSDDFDDKIAELASELTDEANEILTVLQRLYFSLNLADILTNRQTKQVADSISTAMINRYDDHKHHLKMLKELEAQVTQEQRDGLKKAYDEYIDGDKPTIDTFYTNIKKNLDDSELANQIKSLIDLQAFMPKQRSKENGSIPHQLHQRELDQLIEVQGKYYPWLLAAKDKLDALIAFRVPYYVGPMIDPNQSDDPQNTKFAWMVRKEAGEITPWNFEEKVDKTSSATNFIKRMTTTDTYLLGEPVLPKNSLLYQQFTVLNELNKLKVNGKALTVDQKKYLYEHVCKKQRRVTLKKLSDCLMARGDFPMGAIFTGTTDQKNMNNTLKTYQDFQEIFGDEIDNPDRQVDFEKMIEWSAIFEDREIFKLKLAELNWLTSEQLERVSKKRYQGWGRLSQKLLTHIVNENGERIIDQLWNTNQNFMEIMGQDSVKQAIQEHNGANVAQTGINETIDELYTSPQNKKAIRQILLVVDDIKKAVGYAPANIMMEFAREDRDDHRLIASRARQLEKTYQEISKNWFDNESVTQELKDQIKNKTKFTDRLYLYFIQGGIDLYTGHPLNIDQLSSYDIDHILPQSFLLDNSLNNRVLTSQAENRVHKEDRLPGETVANKMRPTWKMMREQGLMTQRKYNNLTLKPDQISKFNNRGQFINRQLVETRQVIKLAADIMSQKYQADQTKVVTVKANLTHHMREKFNFYKSRNVNDYHHAFDAYLTLFVGNWLLKEYPKLQPYFVYGDFAKTGTNNLKSFNFLYRFERDHKLNDKGAIDTDKDQQLGYMKRIYRFKKMLVTKQLETNEGALYGQTLYPAPKNDKKTRNLINSKKNRPSDIYGGYSNENGSFLTLVKLKKGSKYDYRLVAVPVSKISEIKESELATIEKAIAPQFLKSSGKYRDFQVVLSKILINQKVIDDGMIFTIGSKSYKHNAKQVVLSDNSIQIVSTLSRISDKEKLITVFDEIVDITSKYLPWYKVNDVEKTKMLFRQMQDIDEMKKIIDNSLIGLHCNASITDLGKVGLSKYWGRFVLTAGISLTVDAQLIYQSPTGLFEHRVKVSDL

SEQ ID NO: 1029 - protein, 1386 aa, Lactobacillus hominis
MTKITEDYIVGLDIGTNSCGWVAMDSKNTILRMHGKTAIGSHLFDAGNSAADRRAFRTTRRRIKRRKWRLKLLEEIFDSHLAKVDPYFFARLKESGLSPLDTRKNVSSIIYPTSLEDKKFYVDNPTIYHLRYKLMTEDRKFDLREVYLAIHHIVKYRGNFLYNTPVKAFEASKIDVKGSLKKLNELYEGLDSEFNVELDSNNALEIENIIRDKKIFKINKVKEINQLLSLKTEDKERTKLMKDVSKQIVNAILGYKTKFETILLKDVSKDEADDWEFKLTDVDADNKFENLIGDLNENEQEILLVIRKLANAITLSNIVEEGKTLSESMKDKYKKHSDDLKLLKQVISDHPDRDKAKKLALAYDLYVNNRHGKILQAKDILEKKKTLSKEDFYKEIKKNLDDSKESQEILDAISLDSFMPKQRTNENGVIPYQLHQLELDKIIENQGKYYPFLKEVNPVSSHLKQAPYKLDELIRFRVPYYVGPLISPNESTKNKQTKKNQNFAWMIRKEQGQITPWNFDQKVDRMASANKFIKRMTTIDTYLLGEDVLPANSLLYQKFTVLNELNNVKINGKRISVPLKQELYNNLFKKNSTVTTNKLKSYLKENYKLIKVEIKGLSDEKKFNSGLTTYNKLKNLKIFDQQIDDPNYNKDFERIIEWSTIFEDKAIYKEKLKTIDWLSDRQIDKLSKIRMQGWGQLSKKLLSQLTDNNGQTIIEQLWDSQNNFMQIVNQADFKDAIAVANQNLLVDTSVEDILNEAYTSPANKKAIRQVVKVVDDIVKATSGKVPKQIAIEFTRDADDNAKISQSRANKLRKVYKEMSNELASETIRNELERVAKDQKLLKDKHYLYFMQLGRDAYTGELIDIDNLEQYDIDHVLPQSFIKDDSLENRVLVKKAVNNGKSDNVPVKLYGNRMATDLGMTIRHMWEKWKEQGLITKTKYNNLIIDPDKINKYESSGFIHRQLVETSQIIKLVSTILQSKYPDTEIIVVKARYNHYLRKRLNLYKSREVNDYHHAIDAYLSAICGNLLYQVYPYLRPFFVYGQYKKFSSEPEKEKIIYDKTRRYNFISQIFENKDNDIISRETKKKVFDKKDIIEKLKRAYNYKYMLVSRETETHDQEMFKMTVYPRLSRDTKKSRNLIPKKKDMPTEIYGGYTNNSDAYMIIARINKKKGPEYRVFGVPMRELVNLRKAEKNGHYKAYLKQVLEPEIMYSKNGKKNKTISSFEIVKAKVPYKQVILDGDKKFMLASSTYVQNAKQLTLSQYSMQAITDNCENDTEEEKALVEAYDEILTNIDKYLPLFDINKFREKLHAGREKFVDLPLAEKKETILQVLNGLHDNAVMPKIKSLGLSTPLGFMQFHTGVSLSENAKLIYQSPTGLFEKRLKISDL

SEQ ID NO: 1030 - protein, 270 aa, Lactobacillus iners
MITYLKDNDDITLSFPKDQLINIFKNSNLNSTEKSDQLKPFFGRTNLEKGIIKLLSGGKQDLSNMFRDETLKNSNYKNLKFSDNRFDDERDGYAADLGDRIDLLILLKQIYDASILESMMSQARVSIDGHKYISSAKVCAYEKHKSDLKRLKSLIKKYLPSEYNNIFRKITEKDNYVAYSKSNITNNKREKALKYVKYVDFTKYLTKKLKTIKTQDAEDDQEIFEIKGELEKQSFLPKQRTLDNSIIPYQLHLMELKKYLIINLNIMTFC

SEQ ID NO: 1031 - protein, 255 aa, Lactobacillus iners
MITYLKDNDDITLSFPKDQLINIFKNSNLNSTEKSDQLKPFFGRTNLEKGIIKLLSGGKQDLSNMFRDETLKNSNYKNLKFSDNTFDDERDGYAADLGDRINLLILLKQIYDASILESMMSQARVSIDGHKYISSAKVCAYEKHKSDLKRLKSLIKKYLPSEYNNIFRKITEKDNYVAYSKSNITNNKREKALKYVEYVDFTKYLTKKLKTIKTQDAEDDKEIFEIKGELEKQSFLPKQRTLDNSIIPYQLHLME

SEQ ID NO: 1032 - protein, 343 aa, Lactobacillus iners
MLAKDDQEGITVKDKIISLLTFRLPYYIGPVNPAVHGKFAWVKRLANGKVTPWNYKEKIDIDASHEEFIKTKLSKCSFLIGCDVLPKNSLLYQKYMVLSELNTIKFNGVNISEKLKDDIYQNLFKNIQKVTKKRLQNYIKEHENIIGDVIVTGIDNAFKQGLVSYLKFKKIIGDKIDDDRYQKVLEKIIRDITLYDECAGKKIKKEYKDSDLFTEDELNKIVKLTFNDWGRLSAELLDQLEGEDTVSGETGKIIEFMQKHNYNLMQLMSKKFTFKYKIDEINKSYYQHDKFNYKSMIDSLYVSPATKRILWQSLKVVHEISKIMKHDPEKIFYRNGTFQRRSS

SEQ ID NO: 1033 - protein, 447 aa, Lactobacillus iners
MLYDHKLIGDKKYARLIRSKAFTDDELAGFIARQLVETRQATKETADLLKRLCPKSRIVYAKAQNASIFRQKFDIPKSRTINDLHHAQDAYLNIVVGNIFDTKFTQDPRNFIKNTKDSRNYNLEKIYDYNVERNNYVAWIAPDSKTNGTIANVKCNLSTKDFRVTRPSFYKKGALFNQNLSRKGSNLAPIKEHSPKSNPLKYGGYSGKNNSFFVVVAGKDNKGKDIVKLIPVNTLIYNKMLHCDYKAKQELLTSYVANNFAINNFRIVKDDIKMYSLVKIDGAYYYLVGGTDERIEVKNAMQLLLSKDSIKAVKILEKESKDQFANIKNYKDIDIKLGRTFNEVISKYTNSVFGKSMLISDKYRKDIFKSVDKSILEFNSLNTIAKADNLLKFVTSMRPAGSVDALKMVGLIERIRKSNVISNFNEFKLINQSVTGLFENEEDLLKL

SEQ ID NO: 1034 - protein, 667 aa, Lactobacillus iners
MQKHNYNLMQLMSKKFTFKSKIDEINKSYYQHDKFNYKSMIDSLYVSPATKRILWQSLKVVHEISKIMKHDPEKIFIEMARSKEDHPKRKLSRKADLKQVYKDSKKQIISIIGKDKYQDLSNELDNKDDRDLRWDNLYLYYTQLGRSMYSLKPIDISELMNKNLYDQDHIFPKSKKYDDSIENRVLVEKELNVKKSDIYPISDANIIPQKIKGQVESFWKMLYDHKLIGDKKYARLIRSKAFTDDELAGFIARQLVETRQATKETADLLKRLCPKSRIVYAKAQNASIFRQKFDIPKSRTINDLHHAQDAYLNIVVGNIFDTKFTQDPRNFIKNTKDSRNYNLEKIYDYNVERNNYVAWIAPDGETNGTIANVKCNLSTKDFRVTRPSFYKKGALFNQNLSRKGSNLAPIKEHSPKSNPLKYGGYSGKNNSFFVVVAGKDNKGKDIVKLIPVNTLIYNKMLHCDYKAKQELLTSYVANNFAINNFRIVKDDIKMYSLVKIDGAYYYLVGGTDERIEVKNAMQLLLSKDSIKAVKILEKESKDQFANIKNYKDIDIKLGRTFNEVVSKYTNSVFGKSMLISDKYRKDIFKSVEKSILEFNHLDTIGKADNLLKFVTLMRPSGSAHSLKMVGLIERIRKSNVISNFNEFKLINQSVTGLFENEEDLLKL

SEQ ID NO: 1035 - protein, 1395 aa, Lactobacillus jensenii; identical to SEQ ID NO: 113

SEQ ID NO: 1036 - protein, 1382 aa, Lactobacillus mucosae
MDIGTNSIGWTAIDDHFSLLRVKGKNAIGVRTFKEGETAADRRGFRTARRRLSRRRWRLQFLDEFFAPYLAEVDPNFLARLKQSDISAKDPAKNQEYMGKLLFPDQEAASDGNGYPTLIQMRKAMPAEKAADFPVFNIYQLRYALMNEKRKFDLREIYLAVHHIVKYRGNFLNNTSVDKFKADQIDFNKSFETLNDLFRQVQPIAPFQIDLTKVDELGKLLLDTKQKKLDRQKAVAKLLPLIEDGTDKEIVKAHQQTAREISKLILGYKAKVGLILQNNLDQTLDMSTENSDDQLMQIAEELDDYQMELINQLSLLYSQIMLNEIVPNGETVSASMLNRYYKHRCQLKELKDYGAAQDKKTREQLDHLYAEYIGQIPKDSKFDFTKDLKKLMDKSDLGQKIKDEIEAGDYLPKQRTSANGVIPHQMHQQELDQIIENQKEYYPWLAEPNPVEKNIKNAKYKLDQLVSFRVPYYVGPMITLADQQKTSKASFAWAVRKKAGKITPWNFYDMIDREKSANNFIKRMTNKDTYLLSEDVLPASSLLYQKFTVLNELNNIRVNGRKLQPALKQAIYTDLFQKRKTVNLKTLTNFLAIHEPTLTKPKIEGLSNGRSFNSSLGTYIDMSKILGDSLDDLNYRDDIEKIIEWSTVFEDSEIYGVKLQEIQWLTNEQREKLVRKRYQGWGRLSKKLLTGITDENGQRIIDLMWDTSKNFMQIVHQPVFEEQIAELNQQLLQDADKAPLEVVDDILADAYTSPQNKKAIRQVVKVVADVVKAVGNAPASISIEFARNEDRNKELKNSRRHSIEKLYHETAEKLVKQTNLLEELGNVKDLNDRYYLYFTQAGRDMYDGTPINIDEISTHYEIDHILPQSFLKDNSLDNRVLVKKSENAAKSDRVPAKLYGAKMRAFWKQLKESQLISNRKYLNLTTDPEQVDKYQMQGFVHRQLVETRQIIKLAANIFGSLYPDSAVIETRAELTKQLREKFSLYKVRDVNDYHHAVDAYLTAFAGHYLYQRYPKLRPMFVYGDYAKIYADDLKRLRSVNLFHDLEKDQYNSGTAVNPETKEKIVDVDWLSDYVSKIQHFKYMLISKAVYTQHGQLYGATILPVAQVDKISAPIGIKDDKPVDIYGAYTNEVAAYMAIVRVNGKKPKYKVVSVPVRMLQRLKMAEQKGHDQYMQTLHDVLLRNFTSLKKNRKTGLKEAVVKDFDVLVPCVRYNQLVIDGDTKFTLGSATYQHNAKQLVLCNHSLETLANNFEYVRKHPDEADERMIMLYDDILDQVNHYFTLYDKNKFREKLNAGRDKYLKLPTFSQFENNKKTAIGKSEAIINILRGLHANAAITNLKCLGVSTPFGQLQSPSGIELSENAKLVYQSPTGLFSREVLLKDL

SEQ ID NO: 1037 - protein, 1382 aa, Lactobacillus pentosus
MKKIVNYNLGLDIGTSSIGYAAIDDQGRPVRHQNKTVMGVRLFKEGKTAESTRIFRGTRRRLSHRHWRLGYLDRIFDNEIAKVDENFLPRLKASKRARSDEKRSFRGSLLFPETGDDAYYQKYPTIYHLRYALITQKKQFDIRLIYLALHHMIKYRGNFLDTTPVSAFNIHDIDLTDQFASLNDCYQLLDMDFEFQFDLNNIEQVQKLLLDETLSKTKRQAAVSKVLVMSTGNKAFDDQQNGIASEFIKALLGGPFDLSKILNLSVADVKSWKLHMTDKDVDDTLNSLVEELDENHKQIVNLLQMIYSQVMMLGLLNGQQSISASMIERYDDHAKHWAALKKLLPALGEQEQSTIIHAYTAYTGHSRTKQLSRAEFYTKVNSILKKHENIAEATGLIELIDRNEFMPKQRDAVNGVIPHQLHQRELQLIIQNQQKYYPFLAAKAYPDADETMIEQLLSFRVPYYAGPLVDRDFINESSDQEQAMQNTKFSWLKRREAGEITPWNFEQKVDVQETANRFIKRLTTKDTYLMTEDVLPKESLIYQRFEVLNELNAIRINDRRLTAENKQLAFQQLFMAGNTKNVSIKKFRNFVFDSLKFPEKVKITGFAGQHNFLAKLSTYHDFKKIFGERVDHTDLQPDFERIVEWCTIFEDRHIYREKLKEIQWLSQSEIDQLVLIRNHGWGRLSKRLLTGIRDSDGRTVMDQLWFGTDNFMRIISQSDFAAAIANENRTQLNQHGLEDVLDSAFMSPQNKKAIRQVLKVVDDIEQTLGCPPKKVMIEFTRSPDKKKQRTVTRLEKVQQAYKAVADQLAGQSIVSELDQYANTHSKLSDTYYLYFMQLGRDLYSGKPIDIDSPMLDDDHILPRAFMKDNSLDNRALTEKPINNTKAAKFPSKVFGQQKEVTDFWKLLRRCGLMSNIKEKHLYLDPDNVDKWTRRGFIHRQLVETSQVIKIVANILNDRYQQSQTEVLEVPARLGTELRECFGWYKVREVNDYHHVFDAYLAAFIGNYLYRRYPKLQPYFVYGNFAELNKAQLKNIKSFNFLYNITDNKRVVKDIETGQTLWDDQIRQQIQHIYEYKYMLTSHEAFTQHKELYGQTIYPRREFKPGTLKAIKQDQPQELYGGYKNLTAAYMCIVKIQARKRRAAEYRVVRVATESLSALQQAKRLGVQAYERCLRQELVRNNEILRTNADPNSAPREFEVLLDRVLCHQMIISDGQKYLLGSHAYKINCMQLVLSNNSMKILSTSIVKLKQMTNEPLVQVYREILDVVNKYFTLYDVNSFRENLNQFFDKFRTLPITNEYESSKSGKKLIHRGQLETLTLILRGLHANSDKVQYGDQSTLLGGFQTKDGIKLSKDSVIQYTSPAGLNVRTVKLRDLEQKEAQK

SEQ ID NO: 1038 - protein, 1361 aa, Lactobacillus pentosus
MNEPYGVGLDIGTNSVGWTVVDMNGRVRKVKGKTALGARLFKEGATAEDRRGFRTTRRRLKRVKWRLRLLREFFDQPISKIDPNFFARRKYSDISPRDPNYNGLAKTLFNDRTDKEFYDDYATIYHLRDKLMTSNRKFDIREIYLAIHHIVKYRGNFLRTGPASQYGSASLHLATSFQKLNDLFAQSEETLNLKLVTDEALLQQIQQILVRTDLSRSEQQRQIWPLMAVLTGASAAEKKRQKNVVVELSKALVGLKAKMNVVTLTEVDAAVVKDWTFTMEESQDKLPEIEEQLSEVGQQIMDEVIQLYASVNLAQLIPAGKRFSQHMVEKYKHHEKNLELLKAYIHSQSDSKRGREIRATYDRYIDGVDSKPVTQEMFYKDLMKYVEADATSNHLAAEIKDEIDSEQFMPKLRTKQNGSIPYQVQQYELDQIISHQKKYYPWLGEENPVAERRGKFPYKLDELVGFRVPYYVGPLITKEDQQATSGAGFAWMVRKADGPITPWNFDQKVDRIASATAFIQRMQTTDTYLIGEDVLPARSLIYQRFMVLNELNNMRVEDRKLAPQQKQRLYNQVFKQHQHVSVKNIQQNLMDAGEYRKTPQITGLADPKGFNSSLSTYHDFKKILLEAIADEHKRADIEKIILWSTTFEDSAIFKQKLEEVAWLTDAQRKQLSGLRYRGWGQLSHKLLTAFKDDKGRSIMDGLWETSDNFMQLRKQPAIETQIKEANQANLTDADIQDTINELYTSPQNKKAIREVMLVLDDIKNAMHGQTPSWIFVEAARGGGVAGRRTQSRSSQIVEAYKGTAKEIVSEKVQHELNEKIKAKADFNTRLVLYFLQNGRDLYTNEAINIDRLSEYDIDHILPQSLVKDDSLDNRVLTSARINREKNDTFASEKFGRKMGAQWRELHRNGLMTQRKLKHLLMRPDEISKHATDFINRQLVETRQVIKLVEELISSEYPAASIVAVKANLTHQFRQTFNFPKLREVNDYHHAFDASLTAFIGMYLLKQYPKLERFFVYGKFAKQPINLTRFNIIRKLAVAEKPIANIETGEILWDKTADIKYFEKLYNYKRLLVTHEVRENYGAMFKQTLFKASYNKSKTLVPKKNHMETSVYGGYSNQETAYLAIVRIPFKSGFKFIVVGIPTRMVAKIKHYQSLGATLNQATHKVIEPKFTKISRKTKQTVISDYEVVLPKVYLDQVVRDQVKGQMYRFSLGSDKEYHNVQELYLPLSIQQAFVGHYDESDDQRSNDLVKVYDAALKQLQRYFPLHLSRNFDQVASQAHQSFEGLKNNVQTSDKQLGKKEVLNSLFVGLHANATRSNLSVLGMSKDFGRIKSNGITLTDQAEIIYQSPTGLFERKVALKDL

SEQ ID NO: 1039 - protein, 1358 aa, Lactobacillus pentosus
MNEPYGVGLDIGTNSVGWTVVDMNGRVRKVKGKTALGARLFKEGATAEDRRGFRTTRRRLKRVKWRLRLLREFFDQPISKIDPNFFARRKYSDISPRDPNYNGLAKTLFNDRTDQEFYHDYPTIYHLRDKLMTSDRKFDIREIYLAIHHIVKYRGNFLRTGPASQYGSASLHLATSFQKLNDLFAQSEESLNFKLVTDEAQLQQIQQILVRTDLSRSEQQRQIWPLMVVLMGATAAEKKRQKDFAKELANALVGLKAKLNVVTLTNVDTTVVKDWTFTLEESQDKLPEIEEQLSEVGQQIMDEVIQLYASVNLAQLIPAGKRFSQHMVEKYNHHEKNLELLKAYIHSQSDSKRGREIRATYDRYIDGVKSKPVTQEMFYKDLMKYVEADATSNHLAAEIKDEIDSEQFMPKLRTKQNGSIPYQVQQYELDQIISHQKKYYPWLGEENPVAERRGKFPYKLDELVGFRVPYYVGPLITKEDQQATSGAGFAWMVRKADGPITPWNFDQKVDRIASATAFIQRMQTTDTYLIGEDVLPARSLIYQRFMVLNELNNMRVEDQKLAPRQKQRLYNQVFKQHQHVSVKNIQQNLMDAGEYRETPKITGLADPKGFNSSLSTYHDFKKILPEAIADEHKRADIEKIILWSTTFEDSAIFKQKLEEVAWLTDAQRKQLSGLRYRGWGQLSHKLLTAFKDDNGRSVMDGLWETSDNFMQLRKQPAIETQIKEANQANLTDADIQDTINELYTSPQNKKAIREVMLVLDDIKNAMHGQTPSWIFIEAARGGGVAGRRTQSRSKQIVEAYKSTAKEIVSEKVQHELNEKIKAKADFNTRLVLYFLQNGRDLYTNEAINIDRLSEYDIDHILPQSLVKDDSLDNRVLTSARINREKNDTFASEKFGRKMGAQWRELHRNGLMTQRKLKHLLMRPDEISKHATDFINRQLVETRQVIKLVEELISSEYPSASIVAVKANLTHQFRQTFNFPKLREVNDYHHAFDASLTAFIGMYLLKQYPKLERFFVYGKFAKQPINLTRFNVIRKLAVAEEPIANIETGEILWDKTADIKCFEKLYNYKRLLVTHEVRENYGAMFDQTIFKATDSRKRLIQKKKGFATETYGGYTGRTLAYLAIVKVVTNKDTQYQVVGIPTTMVTQIQQLEASGLTSKQAVTKAIGAMINENNKKLQSYEVLLPKVRFEQVVRDEVKGHIHRFALGTDTYYHNIQELYLPLTIQRAFLGKRNDTDAQTEQNLLTVFETTLAQVNRYFPLYEMNKFKQILNSAQEKFAALPTKNKTVKNKLVTGKDGVLNNLFIGLHANASLGDLKILGMKIGFGKLQVPGGLKLTDQAEIIYQSPTGLFERKVALKDL

SEQ ID NO: 1040 - protein, 1358 aa, Lactobacillus plantarum
MKEPYGVGLDIGTNSVGWTVVDASGHVRKIKGQTGIGVRLFKEGAAAADRRGFRTTRRRLKRVKWRLRLLREFFDQPISKVDINFFARRKYSDVSPRDPNYNGLEKTLFNDRSDQDFYHDYPTIYHLREALMTQHRKFDVREIYLAIHHIVKYRGNFLRNDAATAYRSGTLDLQQHFETLNHLFSQADLELNLNLTTDVALLDSIKQTLVRTDISRSDRQKLIMPLLAVLTGATTAEKKRQKAVVTEFAKALVGNKTKIDVLTLTDIDATEAKDWAFSLEENQDKLPGIEDRFSEVGQQIIDEVIRLYASVNLAQLIPEGKRFSQSMVEKYKRHGEDLKLLKAYIRSQSDAKRGRAIRATYDQYIDGVKSKQVTQEAFQKALGKFVDADVDLNSWAAQIKQAIDSEQFMPKLRTKQNGAIPYQVQQNELDQIISNQKEYYPWLGEENPVIKRRGKFPYKLDELFGFRVPYYVGPLITKEMQAATANAGFAWMVRKADGPITPWNFDDKVDRVASATAFIQRMQTTDTYLIGEEVLPARSLIYQRFMVLNELNNIRVDDGQLTPRQKQRLYNQVFKKHKRVTAKNIQDNLVAAREFPTAPRITGLADPKVFNSSLSTYHDLKQVLPEAMSDVRKQADIEKIILWSTIFEDSTIFKQKLTEISWLTAAQLKQLGQLRYRGWGQLLRKLLTGLKDDNNRSIMDGLWETNANFMQLRSQPAIENQIKSANQANLTTADLQDTINELYTSPQNKKAIREVMVVLADIKDAMHGQTPNWIFVEAARGGGVAGRRTQSRSKQIVAAYQGTAQAIVRDQVQRELKEKIKNKANFNTRLVLYFLQNGRDLYTGDAINIDRLSEYDIDHILPQSLVKDDSLDNRVLTNARINREKNDTFASEKFGKKMGAKWKEMHRMGLMTKRKLDHLLMRPDEISKYATGFINRQLVETRQVIKLVEELINAEYPSTAIVSVKANLTHQFRQTFDFPKIREVNDYHHAFDAALTAFIGTYLLKRYPKLERFFVYGKFAKQPVNLTRFNVIRKLAKTDTPITDIDTGEVLWDKLTDIKYFETLYDYKRLLVTREVSENYGAMFDQTLLKASDNGKRLIRKKQSFDTAIYGGYTGKTLAYMAIVKVSTKKDVQYQVVGVPTTMVTQIEQLEQQGMTNKQAVTKVIEPLIAANNKKMLTYEVLLPKVRFEQVVRDRIKGQTHRFALGTDTYYHNIQELYLPLTLQRAFLGKQNESEVQLNQNLLTVFDATLAQVNRYFPLYEMNKFKKILNSARDQIELLEAKNQFVKNKLVLGKQGILTNMFIGLHANASYGDLKVLGVKIDFGKLQVPGGIKLTGDAEIIYQSPTGLFERKIALKDL

SEQ ID NO: 1041 - protein, 1361 aa, Lactobacillus rhamnosus
MTKLNQPYGIGLDIGSNSIGFAVVDANSHLLRLKGETAIGARLFREGQSAAERRESRTTRRRLSRTRWRLSFLRDFFAPHITKIDPDFFLRQKYSEISPKDKDRFKYEKRLFNDRTDAEFYEDYPSMYHLRLHLMTHTHKADPREIFLAIHHILKSRGHFLTPGAAKDFNTDKVDLEDIFPALTEAYAQVYPDLELTFDLAKADDFKAKLLDEQATPSDTQKALVNLLLSSDGEKEIVKKRKQVLTEFAKAITGLKTKFNLALGTEVDEADASNWQFSMGQLDDKWSNIETSMTDQGTEIFEQIQEHYRARLLNGIVPAGMSLSQAKVADYGQHKEDLELFKTYLKKLNDHELAKTIRGLYDRYINGDDAKPFLREDFVKALTKEVTAHPNEVSEQLLNRMGQANFMLKQRTKANGAIPVQLQQRELDQIIANQSKYYDWLAKPNPVEKHRASKPYQLDELLTFRIPYYVGPLITPKEQAESRENVFAWMIRKDPSGNITPYNFDEKVDCPASANMFIQRMKNTDTYLIGEDVLPKRSLLYQKYEVLNELNNVSIDGRRLGADQKQRLIREVFERHSSVTIKQVAENLVAHGDFAKRPEIRGLADEKRFLSSLSTYHQLKKILHEAIDDPTKEHDIENIITWSTVFEDAAIFKTELAKISWLDSDTIKALSNIRYRGWGQFSRKLLDGLKLGNGHTVIQELMLSNHNLMQILTDETLKTTMAELNQDKLKADDIEDVINDAYTSPSNKKALRQVLRVVEDIKHAANGQDPSWLYIETADGPGTAGKRTQSRQKQIQTVYANAAQELIDSAVRGELEDKIADKASFTDRLVLYFMQGGRDIYTGAPLNIDQLSHYDIDHILPQSLIKDDSLDNRVLVNATINREKNNVFASTLFASKMAATWRKWHEAGLISGRKLRNLMLRPDEIDKFAHGFVARQLVETRQIIKLTEQIAAAQYPNTKIIAVKAGLSHQLREELDFPKNRDVNHYHHAFDAFLAARIGTYLLKRYPKLAPFFTYGEFAKVDVKKFREFNFIGALTHAKKNIVAKDTGEIVWDKERDIQELDRIYNFKRMLITHEVYFETADLFKQTIYAAKDSKERGGSKQLIPKKQGYPTQVYGGYTRENTAYLAVVKTVEKKADVYRVVRIATSQVAALKEARAQSTVKERELLKKFLTTKFTKIGKNGKKAITPFDIVIPRVPREQLFHNKRYGFFMVNSDTLMHNYQELWMSRSDQQILSKLVKSAKTVENGQVGRLFENIVEQINKYFPLYDINQFRKKLDQSKDIFSKLPLEGNGTTSGKRETIQNILTGAGTGAKNGDLKNLGIKTPFGFLQVPSGIVLDDDTTLIYQSPTGMLNRIVRLSEL

SEQ ID NO: 1042 - protein, 1361 aa, Lactobacillus rhamnosus
MTKLNQPYGIGLDIGSNSIGFAVVDANSHLLRLKGETAIGARLFREGQSAAERRESRTTRRRLSRTRWRLSFLRDFFAPHITKIDPDFFLRQKYSEISPKDKDRFKYEKRLFNDRTDAEFYEDYPSMYHLRLHLMTHTHKADPREIFLAIHHILKSRGHFLTPGAAKDFNTDKVDLEDIFPALTEAYAQVYPDLELTFDLAKADDFKAKLLDEQATPSDTQKALVNLLLSSDGEKEIVKKRKQVLTEFAKAITGLKTKFNLALGTEVDEADASNWQFSMGQLDDKWSNIETSMTDQGTEIFEQIQELYRARLLNGIVPAGMSLSQAKVADYGQHKEDLELFKTYLKKLNDHELAKTIRGLYDRYINGDDAKPFLREDFVKALTKEVTAHPNEVSEQLLNRMGQANFMLKQRTKANGAIPVQLQQRELDQIIANQSKYYDWLAKPNPVEKHRASKPYQLDELLTFRIPYYVGPLITPKEQAESRENVFAWMIRKDPSGNITPYNFDEKVDCPASANMFIQRMKNTDTYLIGEDVLPKRSLLYQKYEVLNELNNVSIDGRRLGADQKQRLIREVFERHSSVTIKQVAENLVAHGDFAKRPEIRGLADEKRFLSSLSTYHQLKKILHEAIDDPTKEHDIENIITWSTVFEDAAIFKTELAKISWLDSDTIKALSNIRYRGWGQFSRKLLDGLKLGNGHTVIQELMLSNHNLMQILTDETLKTTMAELNQDKLKADDIEDVINDAYTSPSNKKALRQVLRVVEDIKHAANGQDPSWLYIETADGPGTAGKRTQSRQKQIQTVYANAAQELIDSAVRGELEDKIADKASFTDRLVLYFMQGGRDIYTGAPLNIDQLSHYDIDHILPQSLIKDDSLDNRVLVNATINREKNNVFASTLFASKMAATWRKWHEAGLISGRKLRNLMLRPDEIDKFAHGFVARQLVETRQIIKLTEQIAAAQYPNTKIIAVKAGLSHQLREELDFPKNRDVNHYHHAFDAFLAARIGTYLLKRYPKLAPFFTYGEFAKVDVKKFREFNFIGALTHAKKNIVAKDTGEIVWDKERDIQELDRIYNFKRMLITHEVYFETADLFKQTIYAAKDSKERGGSKQLIPKKQGYPTQVYGGYTRENTAYLAVVKTVEKKADVYRVVRIATSQVAALKEARAQSTVKERELLKKFLTTKFTKIGKNGKKAITPFDIVIPRVPREQLFHNKRYGFFMVNSDTLMHNYQELWMSRSDQQILSKLVKSAKTVENGQVGRLFENIVEQINKYFPLYDINQFRKKLDQSKDIFSKLPLEGNGTTSGKRETIQNILTGAGTGAKNGDLKNLGIKTPFGFLQVPSGIVLDDDTTLIYQSPTGMLNRIVRLSEL

SEQ ID NO: 1043 - protein, 1352 aa, Lactobacillus ruminis
MNDNFDLMRVKGKKGIGVRLYNEGQSAAERRMHRTARRRYGRRKWRLRLLEDFFDEHMAEVDDTFFARLKDSNISPKDDKKYRKSLLFPKSKGVTYQDDGEFYKKYPTMYHLRYALMTEHRKFDLREIYLAFHHMVKYRGNFLYDTSVDSFEAKNLDIKGKFDEINDLLSSYTDFYVDNSNAALVESILLEKNTTRKDKSKKIAKLLHVEDKEKGKNKKAKDLATQISNAVLGLKCNFHLIFELQQKYSFDLCSEKTEENIAKLSEVLDENQKMLLMILKEVQDQVMLNAFVPSGMSLSEAMMQKYDDYGEQLKIYHELEHSVSDDSAAKLRGAYRDYNDNIIKRIDGDNKKDTFYKRVKNILTKISKEYVDQDVLESCGKLKKLIDENKLFIRQRTAANGVLPHQLHQIEMRKIIDNQKEYYPWLAEPNPNEKRRVYSKYKVEELIAFRIPYYVGPLVDPNNADKNKEARFSWMVRKKDGEITPWNFYDKVDWAESANNFIERMKSKDTYLLGEDVVPKESMLYQKYEVLNELNNLRINDSGLSDSFEDVKLKQAIYNDLFKKQKIVKITDLQNYLVQNHKYLVKPKISGLADENRFLSSLSTYSDLKTIFGDKVDDRTYFNDFEKMVEYSTVFEDGHDYNQKLDEYTWLTKEEKYKIGKKRYRGWGKLSKKLLTGLRDKNNHTIMDNLWETNRNFMQIQTADEFSKQIAEENERHLKGSVSDAINDMYTSPANKKAIRQVLRVVDDIQKAMGYAPSSISLEFAREDGPSVRTVSRANRMKSIYEKYASEVSEEVMKDLDGVIKDKKGLNDRLYLYFEQQGKDMYSGHPLDFDKVISGQEYDIDHILPQAVIKDDSLDNRVLTTKALNNDVKSKGVPCRMFNGMHSFWKNLYDKGFISRRKFNNLTTNPENIDKYKMKGFVNRQLVETRQIIKLVANVLNDKYQNDDVDIIEVRAELTHDVRKHFKFYKNRNVNDYHHAFDAYLTSFIGHYLFKKYPNLRPLFDYNDFMKVSDNVFKQLRGNNFLGEFLNKTGDIISTDGNFVLNKEEMINKLNKAYAFKKILVTKEVGQRTGAMFNETRYPAPNSRKAALKYRRMPKPDSLISVKDYKNTDIYGGYSGKNDAYMVIVDMGKQYMVVGVPVRYTEKLDKLRIKHSELYRDELRKVLSRDKTLLDSKGNVKRFDIVLDRVLYGQLIEDGNELFTLGSSKYKRNFRQLFLDKQCIEILDSSATPQPTDEELIWVYDQILDKVDKYFELYDINRQRETLRKGRAAFCSLPNISMKKDDVTKKKILNEILVALHANESESNCEKIGKKVFGRLQVPGGIKLSKEAKLIYQSPTGLFERVVYLKDL

SEQ ID NO: 1044 - protein, 1339 aa, Lactobacillus salivarius
MERYHIGLDIGTSSIGWAVIGDDFKIKKKKGKNLIGTRLFNEGATAAERRGFRTQRRRLNRRKWRLKLLEEIFDPYMAEVDEYFFARLKSSNLSPKDSNKKYLGSLLFPDKSDSNFYDKYPTIYHLRRDLMEKDEKFDLREIYLAIHHIVKYRGNFLEKVPAKNYKNSGASIGFLLEEVNSLYKDIIGDESIAILNSEKFEDVEKIILDEETRNLDKQKSVGKLLVEDKKKKNIVTAFSKAIFGYKFNIEDLLLIENDEKNKLTFNDENIDDIFNELSHSLDDKQMDLLTKTREIYFKFKLNMIVPTGYTLSESMIEKYEMHKAHLKMYKEFINTLNTKDRKILKNAYSDYINTEKAKAANAQENFYKTVKKIIKDNNSDTAKKIIVLIDEGNFMPKQRTGENGVIPHQLHQIELDRIIENQAKYYPWLAEANPVEKNRKFAKYKLDELVTFRVPYYVGPLIDKTESNKNEKETKFAWMVRKAKGTITPWNFENLVDRTESANRFIKRMTSKDTYIIGEDVLPASSLLYEKFKVLNELNNIKVNEKKLDIEQKQDIYLNLFTTAKNVTKKSLATYLNCSADSISGLSDGEKFNSSLSSYIDLKAILGNIVDDCNKNEDLEKIIEYSTVFEDGNIYKEKLSEISWLTDEQIEKLSNIHFKGWGRLSKKLLTQITNENGERIIDALWNTSNNFMQIINDESIQAKLAEINGKYAGKSDLEDILSEAYTSPQNKKAIRQVMKVVEDIEKAMQCEPTSISIEFTRKKQKSRLTNTRYKKISDVYEKIADEVISEYELRKLQSELDSNANNMRDRYYLYFMQLGRDMYTGEKINIDELHQRYDIDHILPQSFIKDDSINNRVLTRKDVNNKEKSDKTAADLYAVEMSDFWRKLRKQGLITEQKYKNLLTKSDSIDKYAKKGFIKRQLVETSQVVKLVANILQDKYSDTKIIEVRAKLNSNLREEYKLIKNRAVNDYHHAIDGYLTTFIGQYLYKTYPKLRSYFVYNDFKKLDSNYLKHMKKFNFLWQLQDDKTIDIYDNVNNKFVLNVPEMKKYIQKIYNYKYMLVSKEVTTKNGAFYDQTKYNAKTVNLIPIKKNKPTNIYGGYKGKVSSYMMLVKIRKKKEVIYKFVGVPRLWTDELDRLKDTTERKILLNEIAKNSLSKTEQDFEVILDKVYYGQLIIDGNQKYTLGSSEYKYNAMQLHLSKHALEVLAKENVKDAEITDKDLVSVYEEILSVVNKYFELYDINKFRQKLNEGLEIFRKLPVYNVYESNKIKQVGKFEVLNRILMGLHANAMITDLKVLGIKTKLGQMQVNGGIKLSPDAKLIYQSPTGIFSRAVRVKDLG

SEQ ID NO: 1045 - protein, 629 aa, Lactobacillus salivarius
MERYHIGLDIGTSSIGWAVTGDDFKIKRKKGKNLIGTRLFKEGNTAAERRGFRTQRRRLNRRKWRLKLLEEIFDPYMAEVDEYFFARLKDSNLSPKDSNKKYLGSLLFPDISDSNFYDKYPTIYHLRRDLMEKDEKFDLREIYLAIHHIVKYRGNFLENVPAKNYKNSGASIGFLLEEVNNLYKDIVGDENVTILNSEKFEDVEKIILDDGIRNLDKQKGVGKLLVEDKKNKNLVTAFSKAIFGYKFNIEDLLLVEGDEKSKLTFNDENIDDIFNELSHSLDDRRMDLLTKTREIYFKFKLNMIVPTGYTLSESMIEKYEIHKAHLKMYKEFINTLNSKDRKILKNAYTDYINNEKAKAANAQENFYKTVKKTIKDNDSDIVKKIIDLIDEGNFMPKQRTGENGVIPHQLHQIELDRIIENQAKYYPWLAEENPVEKNRKFAKYKLDELVTFRVPYYVGPLVDKTESNKNEKETKFAWMVRKSKGTITPWNFENLVDRTESANRFIKRMTSKDTYIIGEDVLPASSLLYEKFKVLNELNNIKVNEKKLDIEQKQNIYLKLFTTTKNVTKKNLATFLNCSIESISGLSDDKKFNSSLSSYIDLKVILGDIVDDYSKNEDLEKIIEYSTIF

SEQ ID NO: 1046 - protein, 897 aa, Lactobacillus salivarius
  misc_feature (822)..(822): Xaa can be any naturally occurring amino acid
MLIESDEKNKLTFNDENIDDIFNELSHSLDDNQMDLLTKTREIYFKFKLNMIVPTGYTLSESMIEKYEMHKAHLKMYKEFINTLNAKDRKILKNAYSDYINNEKAKAANAQENFYKTIKKTIKDNNSDTAKKIIGLIDEGNFMPKQRTGENGVIPHQLHQIELDRIIENQAKYYPWLAEENPVEKNRKFAKYKLDELVTFRVPYYVGPLVDKTESNKNEKETKFAWMVRKAKGTITPWNFENLVDRTESANRFIKRMTSKDTYIIGEDVLPASSLLYEKFKVLNELNNIKVNKKKLDVEQKQHVYLDLFTTRKNVTKDNLATSLNCDVESITGLSDNEKFNSSLSSYIDLKAILGNAVDDCNKNKDLEKIIEYSTIFEDGNIYKEKLSEISWLTDEQIEKLSNIHFKGWGRLSKKLLTQITNENGERIIDALWNTSNNFIQIISDESIQAKLAEINGEYADKSNLEDILDEAYTSPQNKKAIRQVMKVVEDIEKAMKCKPTSIAIEFTRRKGKSKLTNTRYKKISETYEKITDELISEYELGKLQSKLDSKANNMRDIYYLYFMQLGRDMYTGEKINIDELHQYYDIDHIFPRSFIKDNSLNNRVLTRKEINNNEKADRTAADLYAVKMGDFWRKLRKQGLITEKKYKNLLTRTDSIDKYTKQSFIKRQLVETSQVVKMAANILQDKYSNTKIIEVRARLNSDLRKEYELIKNREVNDYHHAIDGYLTIFIGQYLYKTYPKLRSYFVYDDFKKLDSNYLKHMDKFNFIWKLEDKKAEDVYDNVNNEFILNVPKMKDYIQKIYNYKYMLISKEVTTESGAFYXZTKYNAKTINLIPIKKDKPTNIYGGYKGKVSSYMMLVKIQKKKEVIYKFVGVPRLWTDELDRLIDTDEKKALLKK

SEQ ID NO: 1047 - protein, 1419 aa, Lactobacillus sp.
MAKPQNYTIGLDIGTNSVGWTVTDDQNNILRIKSKKAIGARLFEEGKVAAERRSFRTTRRRLSRRKWRIKLLEELFDEEISKVDPNFFARSHESWISPKDKRERYSAIVFPTPEEDKKFHNEYPTIYHLRDRLMKDDQKHDIREIYVAIHHIMKYRGNFLHDESIETYRSGMSSLGGGDERTILNTKILDDLNDAFADNLATQGISVNSASADQINEIVTSGHLNVDSQKAIAKLLLPTTLSSDDKKQDKKIKKLATDAAKNVASAWLGYKANFAAILNIQEVDKDKKKIYSFALQGADEEDKVETLESVLSQDQIEIVDRIIRIRHAIVLGEIIPVGMTLSEAMIEKYDQHAKDLKNLKTVIRNLKDRKNAVKLQAIYDLYVNNRHADTAKAMKLAGVKKRTELLEPEEFNKSIEKLLDDSPVSAEIKKRIAEKDFLPLQRSNSNGVIPNQLHQIELDEIIKKQSKYYPFLGETNEHASADVARKAPTKLDQLLTFRVPYYVGPLITKEEQEEQDGHSFAWMIRKNPKDHEKITPWNFDEKVDRMASATQFIKRMTTKDTYLLGEDVLPSSSLKYQLFTVLNELNNLRINHKKLTREEKEQVIEDLFKKYKTVKADKFKNYWQKGHAGLDVKIQGMADPEKFNSTMSTYIDLQKIFGDQLDDAQRQNDFEKIIEYSTIFEDRKILGEKLRADFVWLSEDQIKRLCRLRLQGWGRLSLKLLTRLTDADGQNVLERLLNSNDNFMQIVKDPVIKAKIEQKNQKLLRADWSENATESILDEAYTSPQNKKAIRQVMRVVHDIVKACDGNLPAKFAIEFARSQDDDPKRTVARADRLQKIYAQISDEVVSQGVKDQLSGMKSLKDRYYLYFMQGGRDAYTGKPLNIDRLSDYDIDHIMPQSFIKDDSLDNRVLVTRAVNNQKSDNVPVLLYGNHLVADLGITIREMWDRWQKSGMISKRKLANLLTDPATLSEYRAEGFINRQLVETSQVIKLTATILQSEFPDSKIIEVPAKYNSILRKQFDLYKSREVNDYHHAIDAYLSTIVGNYLYQVYPNLRRLFVYGEFKKFSHGEEESSHQAVRRVKSMNFLDDLLRGKHGDDIYCRVTGEVIFSRKDIISKLKQAYSFKQMLVTQEVFTKKSALFDQTVYPSPARDSKTRSGLIPRKQGMDTEIYGGYSGNKDAYFVLAQVVKSKGHTLQVVGVPIRALRALANCSNYSEQLLKIVKAQVLFNKKTGKAKKGISDVRILLDKIPYRQPVLDGSAFYMLGSSTYKYNLKQISLSQQSMKYILDYIDDPNFNKHEMTKIDQQNEKECLLSVYDEILDKMDKYLSLYDINGFRKKLHVGRDKFIKLEVEKQAEAIKNVLRGFHANSDMTKLSDLGLSTSLGFMQASDGIKLSDNAVFIYQSPTGLFERRVKVSDLLK

SEQ ID NO: 1048 - protein, 1289 aa, Lactobacillus versmoldensis
MRRRYRRRRNRLNWLDELFADELAKIDPSFLLRMKNSWVSKKESTRKRDPYNLFIDEKYNDVDYFNQYPTIFHLRKELITEDKKVDIRLIYLAIHNIIKYRGNFTLENQNFDISQLSSNFSQQISDFFALFSDFGVIMPEDFDPDKISDILLNPNLSPSGKVSEAIATISPKTNVKAKIKIILLLLVGNNGDLKKLFDLETTEKIAVKLSSRHIDSELPIILSELNEQQENIITIANSIFGSIILKDFLGDETSISAAKVISFEDHKQDLQKLKTMWRETSNKEAVKAGKKAYEDYIGHEDSETFYKKIKKFLEKAQPVDLANKALAEIELENYLPKQRNRNNTVIPYQLNENELIAILDHQEKYYPFLKENRDKILSLLTFRIPYYVGPLQDSNNNRFSWMTRKASGAIRPWNFSEKVNVEQSSNDFIKRMRSTDTYLIGEPVLPKKSLIYQCYEVLSELNNTRVKDGSSNPKRLDVTIKQRIYNEIFKNQKSVSVKVLQNWLIKESYFKSPEISGLADKKKYLSSLSTYIDFKKIFGQRFVDDPVNSPQLEELAEWLTLFEDKKILLIKLQNSKYSYDQATINKLSTMRYQGTGKLSKKLLVDLKTTKKSIGKSGAESLSILDLMWSTKDNFMQIIHDADYTFEQQIKEFNYDTEDELTPLEKVANLHGSPALKRGLNQSIKVVADIVKFMGHDPEKIFIEFTRSDDFSKLTISRYRRIKKQYLEIAKAIKKIPAEFKDIKEYQTQLEENKGKLASERLMLYFLQCGHSLYSNKPIDLNMINSSKYHVDHILPQSYIKDDSLENKALVLASENENKIDNMLISHDIIATNLPRWQALKDQNLMGSKKFADLTRTTVTENQKKGFIQRQLVQTSQIVKNITLILNDLYKNTSCIETRATLSSEFRKAFSNFDETTYHYQFPEFVKNRDVNDFHHAQDAFLACVIGEYQLKKYPKDNLRLVYDQYSKFLDSLKKDTRKKNGRMPRYTQNGFIIGSMFNGKTYVDDNGEIIWDQKIKESIRKTFNYHQFNVVRQTIEQHGKLFNDTIQPHSDRYKLIPLKTNRDPAIYGGYNNDNNAYSVVLDVDGKKKINGIPIRIANQLKSDELDLSSWLENNIKHKKPMTILIDKVPKYQRIINEETGDLLITSANEVINNVQLFLPSMYTALISLLDSTKTEMYSKLLSNYEANILIDIYDYLLTKLKNNYPLYRKEWAKLAEHRDDFIESDLVTQASTLQQLIKFMHADPSNVNLKFGNFKGNRFGRKNGNIKLSKTDFIYESPTGLFKSIKHID

SEQ ID NO: 1049 - protein, 1372 aa, Legionella pneumophila
MESSQILSPIGIDLGGKFTGVCLSHLEAFAELPNHANTKYSVILIDHNNFQLSQAQRRATRHRVRNKKRNQFVKRVALQLFQHILSRDLNAKEETALCHYLNNRGYTYVDTDLDEYIKDETTINLLKELLPSESEHNFIDWFLQKMQSSEFRKILVSKVEEKKDDKELKNAVKNIKNFITGFEKNSVEGHRHRKVYFENIKSDITKDNQLDSIKKKIPSVCLSNLLGHLSNLQWKNLHRYLAKNPKQFDEQTFGNEFLRMLKNFRHLKGSQESLAVRNLIQQLEQSQDYISILEKTPPEITIPPYEARTNTGMEKDQSLLLNPEKLNNLYPNWRNLIPGIIDAHPFLEKDLEHTKLRDRKRIISPSKQDEKRDSYILQRYLDLNKKIDKFKIKKQLSFLGQGKQLPANLIETQKEMETHFNSSLVSVLIQIASAYNKEREDAAQGIWFDNAFSLCELSNINPPRKQKILPLLVGAILSEDFINNKDKWAKFKNFWNTHKIGRTSLKSKCKEIEEARKNSGNAFKIDYEEALNHPEHSNNKALIKIIQTIPDIIQAIQSHLGHNDSQALIYHNPFSLSQLYTILETKRDGFHKNCVAVTCENYWRSQKTEIDPEISYASRLPADSVRPFDGVLARMMQRLAYEIAMAKWEQIKHIPDNSSLLIPIYLEQNRFEFEESFKKIKGGSSDKTLEQAIEKQNIQWEEKFQRIINASMNICPYKGASIGGQGEIDHIYPRSLSKKHFGVIFNSEANLIYCSSQGNREKKEEHYLLEHLSPLYLKHQFGTDNVSDIKNFISQNVANIKKYISFHLLTPEQQKAARHALFLDYDDEAFKTITKFLMSQQKARVNGTQKFLGKQIMEFLSTLADSKQLQLEFSIKQITAEEVHDHRELLSKQEPKLVKSRQQSFPSHAIDATLTMSIGLKEFPQFSQELDNSWFINHLMPDEVHLNPVRSKEKYNKPNISSTPLFKDSLYAERFIPVWVKGETFAIGFSEKDLFEIKPSNKEKLFTLLKTYSTKNPGESLQELQAKSKAKWLYFPINKTLALEFLHHYFHKEIVTPDDTTVCHFINSLRYYTKKESITVKILKEPMPVLSVKFESSKKNVLGSFKHTIALPATKDWERLFNHPNFLALKANPAPNPKEFNEFIRKYFLSDNNPNSDIPNNGHNIKPQKHKAVRKVFSLPVIPGNAGTMMRIRRKDNKGQPLYQLQTIDDTPSMGIQINEDRLVKQEVLMDAYKTRNLSTIDGINNSEGQAYATFDNWLTLPVSTFKPEIIKLEMKPHSKTRRYIRITQSLADFIKTIDEALMIKPSDSIDDPLNMPNEIVCKNKLFGNELKPRDGKMKIVSTGKIVTYEFESDSTPQWIQTLYVTQLKKQP

SEQ ID NO: 1050 - protein, 907 aa, Leptospira inadai
MAKSIEEIRSIQNEFVVEYSILLKKIKKGEIDKKNDVYKVYQNTIKSSERLEQVLKERLGFQNVSKSYFNNPYSIAQLYNLISVDRSGFSKVCRSCQEENHWRSTLIDTDRGPQAQASKQVSDTGRPFDGQLAMLLDRIAFEIVKLKRIEIERLLSNKNSSKIEVVEIPLLIEENSFNFRYELAELKKLSKKKKDQLKKSVEEFDTKLNSKQERIKAASRELCPYTGKKISKGEIDHILPRSWTQKQFGTALNAEANLIYASREGNQSKGNREYGLNDLDEKYLNIIFGTKEVDSIQRNISDTIDRLDIERGTTRIVFDRLAPNERDCLRHALFIKSLRPKVFELLSGQLKARVNGTQLYLAKRIRSLLLKNQDFITKSLIIKVPSFSFYEPRTVDLPYMRKELAEKFPNLGKQNPQPTGSHIIDAAMVMAYAVETDSGNLSFGSKDKSEGFDSESLSRFLPSNIQFLSIKSKDKTDSKYPYKKPLFKDGVFGERFLPILIAEKGLRVGYTLENSLEVNSENPEEFFNVLKPYLLFKRKPIESNYQTLVAFAQKDKRGYIVLPVNKPKALESISQRKSDPHTSILKNILYTVSRESIPSLIFDKNTLIPEIKSNKVNWGDKLEKKFRIKIEIKLYGKKIADGFIRYPGKTEWEKLLLTEPLKGLVKNKTLTPKWFDSLENLAGLDDHFKDTSNPEAKHKRKSNHYALPVPKGPSGGFRIRRNSFDGYKVYQLYSVDGNSFHAFKIENGWTGKTLLLDIYQNSGNLHSLDYDYENTDISQTALFSKFYKIEFSKEETQKINSKGIKSLYVAPGSSSRQYIRVIFDKQTFSKFIKFQSKFWEFDLITPLPKDKAKDLIESILKIFPEDLRPKKPRNDIHIQNISHDSVQVEYIADGKTQGFGQYFINQN

SEQ ID NO: 1051 - protein, 418 aa, Leptospira inadai
MILKSPIAIDLGAKNTGIVYTTYQPNALPTEIHGATIISDNLKLSQVDRRAKRHQRRNYTRMKLARRLVYLIIRYHYRIPEQDLTPEVKTSLQSLLTRRGYTFQSIETEGNELGQAPWGEIEDYFPNVQDYEKSLPIQTVLYHFFSSENLELNKLVPSKEPETKEDKNILKYIREQKEAFESEQNNGARHRLKYFEEIKEDFPRKIKLMECLQKNKIEEKKFLNLIQNISNLQIKPLRAYFNDKDMKEKEIWEPRRLHTYIARWIRSWHIDPKNSSKRLIRQKLLSQLENGKLKIIRDTSIYSPSKDIISFLEEIDPKDTIPPYEDQNNRHPPRCQNLWLDGKILDRYFPGWEQSLWKLIRNEKNNPFEQLITKDFRTDDTISEGKSLSEQIQIYERSHSNIKLDVRAVILQRFLDRS

SEQ ID NO: 1052 - protein, 125 aa, Leptospira inadai
MSAYDRSANLDPWSLRLQGKAKKEIKTTESLSKTDLQKASDAYEKIKEILSESDTDQFIKLANRYYLEVADIKKGMWLPTAPERKHKEIPKSIAHEENQDISLFHKCNTKTGSKKRISQVSLEMF

SEQ ID NO: 1053 - protein, 1355 aa, Leuconostoc gelidum
MTYSIGLDIGTGSVGWAVIGDDYRLKRAKGKNLIGVRLFDSATTAAERRGYRTTRRRLSRRHWRLRLLNDIFASDLAEQDENFLPRLKYSWVNPDDEQNPQLNSDVANGALFGSSETDKAFHKNYPTIYHLRHELMTDTAKHDLREVYLAIHHIVKYRGNFLNTADKINAENSFNVDLFIAALDEYNEFLETPITSIKDAQLFSDKLTDINARNKSVRVENAMSETYDDKSKIFKAILTALVGNTANFQTIFDLSDLEKDEAKNFKFKLDLEDVETKLDVVRAKLSDEQNAFLEAVLIAYDGITLKMILGDYKSISQSMIESYKSHQRDWKYIKNNVRLNEQKIEPDKNSVKFFKLDPKKLIYPSNLAYLQVISSNEDEHRKGLDYFKTAIQDADILQRIENDTFLPRQRTKRNGVLPYQLHLAELEQIIKKQSKYYPFLANIYTQDNKTENKLIGLLKFRVPYYVGPLVEAEKVTGDGKNHWLIKKELQENTPITPFNFDDVVDKDKSGEQFIKRITGTDSYLIGEPTLPENSLLYQKYNVLQELNNVRNERHQRLPIKVKQDIFEHVFKIDKNVNAKKVMAYLKLNGYGDFQIAGLSDTRTGKFNSNLSSYNYFVDLLGREKTEKIREDRLEEIIEIQTVFEDKILVAKRLSNLDFLTPQEKSKLSAKHYTGWGRLSQKLLTTQFIKTALSEAGDIIPQSHSIIDLLYYTDKNLMEILNDKTFNVRNWLTEQNKGTESGNSLYDQIDALAGPKDIKRGITQVFSIIDDIKKAMGSNPETVYLEFARETQTSRLTNSRLNRVQEIYNSPELKTEFAYLAKKLEAETKESIHDDRLYLYYLQEGRDMYTGKEIPFDQISSNYDIDHIIPQAFTKDDSLDNRVLVNRATNARKSNSPTFTNDIIDNRKSWWQSLVKRGLMSKEKFERLTDKRKTFSENQTNHFIARQLVETRQIIKNVADLIKNNYDGTQAVAIRASLTGEMRRYLDWPKNRDMNDYHHAHDALMMATVGKYVDRRGFFDNGSVSDGAGNAYNLYTKDWLVAARVGTRNDSQRVNPYGFIVGSMNSKAVRQQVNKETGEIVWGNENLDYLRHVLSYKKILVTRRLSGSSGRLYAETLFSPNPKAKLIAQKANRSVALYGGFTKAESAYTALVEFNKKGDRSYKLIKVPMAIANRVNDKQITVTAYIASLNLRDFSRVVLEHLPLGTLIRESDGSEFYAASSEYKHNAKELWAPKEILRSSKKLDKATADNLIDIFDFLTNDKTISNFKFYEKDLLHLKNVRDKFVEASDEIKIKVLSDVIYELHNDAGWRDPFKHIQEKPAWTMLQVKGGIKLSEKAAIVYQSPTGLFETITIVGE

SEQ ID NO: 1054 - protein, 883 aa, Leuconostoc pseudomesenteroides
MIGVRLFEGADTAAERRGYRTTRRRLSRRRWRLRLLNDIFASELSKIDENFLPRLKYSWVNKNDTDNVHFGVGVFDNSEQEKAFYQDYPTIYHLRQKLMTDNRQHDLREVYLAIHHIVKYRGHFLNSGEISANSSFDAQKFLELLREFDNTFYPDAVKFLNLDQLDLPDKISSEISDSKISKSERVDRVLQHVQLANSGAKKILKAILNAVVGNSVDSVAMFSLSDLDKEEKKKINHPVTDSKPFKYSDKEVEAKLDELSNLLQDEQKIEFLSLLKLSFDGLTLKMLLGNAKSVSEAMVERYKVHKDDLKFIKENILNSFSKDKKKEFDKYYEAHLAEKDVDNVDKYFKKIIDDSIISKDKKIELLQKIDDHDFLPSQRSKINGAIPHQLHRNELDKIISQQSKYYPFLADSYTQNGKTETKLAGLVNFRVPYYVGPLVSKENADRNNPDGGQNHWVEFKENTSLSNLTPWNFNEIVDKDKSAAKFIERLTGMDTYLIGEPTLPQNSLLYQKYNVLQELNNIRVDNHKLDVKIKQDVFEHLFKTQNSVSAKDVKNYLIANGYAAPSIQITGLSDTNEKTFNSKLSSYNYLVDKLGRTFVESVKSDVLEKIIELQTVFEDKTVLLRQLSMISELTLAQANQLAEKHWTGWGRLSRKLLSSKVVDVNKITNSTFYPATSRQTIIDTLYHTQLNLMEIINNAEDLYGVRQWISEQNKSDSSDTNDVYDQIQELAGDKKIKRGITQSFRILDDIVKAMGGEPERVYLEFARENQQSGVSFSRKNLLSKLYENDSLKQTFKELKSQLESETKENLQNDRLYLYYLQQGRDMYSNDELNIDQLSSYDIDHIIPQAYTKDNSFDNRVLVSSKANRLKRMLLWYPVKLSKK

SEQ ID NO: 1055 - protein, 468 aa, Leuconostoc pseudomesenteroides
MKDQGFISKRKFENLTRRGDFSEQQKERFIARALVETRQIIVNVSSLIDSHFNHTKAVAVKSNMTTDMRHYTKVPKNRDINDYHHAHDALFVATVGQYIENKGFMKAGKLSDSVGNEYNRYTKKWIETARKNTNYGRVNPFGFVVGSMQTATRGKLDYETGELKVVKNNYWSKDDLDYLLKVVSYKKILVTTKLQDNKGAMYDANLISAKGSGKKKAQLQISKSKNIDLYGGFNKLQNEYSVLILNHDEYRWLSIPMYARNSSEQYLHDKYPDAKVILNHILVGQPILLSNSSDPQKSKFASLRIATGGDYHNNFEFVPSVDVKKILDNIYLNHSVTDDEYKKVFESLLATLHDKFVFGIHQVMYNKIFDNKYLFDKMPDEAKRNVINSLLKFMNISKNQLGAVGKIGGKVNGVLYGFKTETEKGTSAGQLISNGKMQPHDIFIFQSPTGIFERRVTVAELANVIKDE

SEQ ID NO: 1056 - protein, 1103 aa, Listeria innocua
LKLYPGEKSTGMFAQFISLIVGSKGNFQKPFDLIEKSDIECAKDSYEEDLESLLALIGDEYAELFVAAKNAYSAVVLSSIITVAETETNAKLSASMIERFDTHEEDLGELKAFIKLHLPKHYEEIFSNTEKHGYAGYIDGKTKQADFYKYMKTTLENIEGADYFIAKIEKENFLRKQRTFDNGAIPHQLHLEELEAILHQQAKYYPFLKENYDKIKSLVTFRIPYFVGPLANGQSEFAWLTRKADGEIRPWNIEEKVDFGKSAVDFIEKMTNKDTYLPKENVLPKHSLCYQKYLVYNELTKVRYINDQGKTSYFSGQEKEQIFNDLFKQKRKVKKKDLELFLRNMSHVESPTIEGLEDSFNSSYSTYHDLLKVGIKQEILDNPVNTEMLENIVKILTVFEDKRMIKEQLQQFSDVLDGVVLKKLERRHYTGWGRLSAKLLMGIRDKQSHLTILDYLMNDDGLNRNLMQLINDSNLSFKSIIEKEQVTTADKDIQSIVADLAGSPAIKKGILQSLKIVDELVSVMGYPPQTIVVEMARENQTTGKGKNNSRPRYKSLEKAIKEFGSQILKEHPTDNQELKNNRLYLYYLQNGKDMYTGQDLDIHNLSNYDIDHIVPQSFITDNSIDNLVLTSSAGNREKGNDVPPLEIVQKRKVFWEKLYQGNLMSKRKFDYLTKAERGGLTEADKARFIHRQLVETRQITKNVANILHQRFNYGKDDHGNTMKQVRIVTLKSALVSQFRKQFQLYKVRGVNDYHHAHDAYLNGVVANTLLKVYPQLEPEFVYGDYHQFDWFKANKATAKKQFYTNIMLFFAQKDRIIDENGEILWDKKYLDTVKKVMSYRQMNIVKKTEIQKGEFSKATIKPKGNSSKLIPRKTNWDPMKYGGLDSPNMAYAVVIEYAKGKNKLVFEKKIIRVTIMERKAFEKDEKAFLEEQGYRQPKVLAKLPKYTLYECEEGRRRMLASANEAQKGNQQVLPNHLVTLLHHAANCEVSDGKSLDYIESNREMFAELLAHVSEFAKRYTLAEANLNKINQLFEQNKEGDIKAIAQSFVDLMAFNAMGAPASFKFFETTIERKRYNNLKELLNSTIIYQSITGLYESRKRLDD

SEQ ID NO: 1057 - protein, 1337 aa, Listeria innocua
MKNMKKPYTIGLDIGTNSVGWAVLTDQYDLVKRKMKIAGDSEKKQIKKNFWGVRLFDEGQTAADRRMARTARRRIERRRNRISYLQGIFAEEMSKTDANFFCRLSDSFYVDNEKRNSRHPFFATIEEEVEYHKNYPTIYHLREELVNSSEKADLRLVYLALAHIIKYRGNFLIEGALDTQNTSVDGIYKQFIQTYNQVFASGIEDGSLKKLEDNKDVAKILVEKVTRKEKLERILKLYPGEKSAGMFAQFISLIVGSKGNFQKPFDLIEKSDIECAKDSYEEDLESLLALIGDEYAELFVAAKNAYSAVVLSSIITVAETETNAKLSASMIERFDTHEEDLGELKAFIKLHLPKHYEEIFSNTEKHGYAGYIDGKTKQADFYKYMKMTLENIEGADYFIAKIEKENFLRKQRTFDNGAIPHQLHLEELEAILHQQAKYYPFLKENYDKIKSLVTFRIPYFVGPLANGQSEFAWLTRKADGEIRPWNIEEKVDFGKSAVDFIEKMTNKDTYLPKENVLPKHSLCYQKYLVYNELTKVRYINDQGKTSYFSGQEKEQIFNDLFKQKRKVKKKDLELFLRNMSHVESPTIEGLEDSFNSSYSTYHDLLKVGIKQEILDNPVNTEMLENIVKILTVFEDKRMIKEQLQQFSDVLDGVVLKKLERRHYTGWGRLSAKLLMGIRDKQSHLTILDYLMNDDGLNRNLMQLINDSNLSFKSIIEKEQVTTADKDIQSIVADLAGSPAIKKGILQSLKIVDELVSVMGYPPQTIVVEMARENQTTGKGKNNSRPRYKSLEKAIKEFGSQILKEHPTDNQELRNNRLYLYYLQNGKDMYTGQDLDIHNLSNYDIDHIVPQSFITDNSIDNLVLTSSAGNREKGDDVPPLEIVRKRKVFWEKLYQGNLMSKRKFDYLTKAERGGLTEADKARFIHRQLVETRQITKNVANILHQRFNYEKDDHGNTMKQVRIVTLKSALVSQFRKQFQLYKVRDVNDYHHAHDAYLNGVVANTLLKVYPQLEPEFVYGDYHQFDWFKANKATAKKQFYTNIMLFFAQKDRIIDENGEILWDKKYLDTVKKVMSYRQMNIVKKTEIQKGEFSKATIKPKGNSSKLISRKTNWDPMKYGGLDSPNMAYAVVIEYAKGKNKLVFEKKIIRVTIMERKAFEKDEKAFLEEQGYRQPKVLAKLPKYTLYECEEGRRRMLASANEAQKGNQQVLPNHLVTLLHHVANCEVSDGKSLDYIESNREMFAELLAHVSEFAKRYTLAEANLNKINQLFEQNKEGDIKAIAQSFVDLMAFNAMGAPASFKFFETTIERKRYNNLKELLNSTIIYQSITGLYESRKRLDD

SEQ ID NO: 1058 - protein, 953 aa, Listeria ivanovii
MKKMLANIDGADYFIDQIEEENFLRKQRTFDNGTIPHQLHLEELEAILHQQAKYYPFLRKDYEKIRSLVTFRIPYFIGPLANGQSDFAWLTRKADGEIRPWNIEEKVDFGKSAIDFIEKMTNKDTYLPKENVLPKHSLCYQKYMVYNELTKIRYIDDQGKTHHFSGQEKQQIFNGLFKQQRKVKKKDLERFLYTINHIESPTIEGVEDAFNSSFATYHDLQKGGVTQEILDNPLNADMLEEIVKILTVFEDKRMIKEQLQSFSDVLDGTILKKLERRHYTGWGRLSAKLLTGIRDKHSHLTILDYLMNDDGLNRNLMQLINDSNLSFKSIIEKEQVSTADKGIQSIVAELAGSPAIKKGILQSLKIVDELVGIMGYPPQTIVVEMARENQTTGKGKNNSKPRFISLEKAIKEFGSQILKEHPTDNQCLKNDRLYLYYLQNGKDMYTGKELDIHNLSNYDIDHIIPQSFITDNSIDNRVLVSSTANREKGDNVPLLEVVRKRKAFWEKLYQAKLMSKRKFDYLTKAERGGLTEADKANFIQRQLVETRQITKNVANILYQRFNCKQDENGNEVEQVRIVTLKSTLVSQFRKQFQLYKVREVNDYHHAHDAYLNGVVANTLLKVYPQLEPEFVYGDYHQFDWFKANKATAKKQFYTNIMRFFAKENQIIDKNGEILWDNRYLDTIKKVLSYRQMNIVKKTEIQKGEFSNATVNPKGNSSKLISRKADWNPIKYGGFDGSNMAYSIVIEYEKRKKKTVIKKELIQINIMERVAFEKDQKAFLEEKGYYSPKVLTKIPKYTLYECENGRRRMLGSANEAQKGNQMVLPNHLMTLLYHAKNCEANDGESLAYIEMHREMFAELLAYISEFAKRYTLANDRLEKINMFFEQNKKGDIKVIAKSFDKLKVFNAFGAPRDFEFFETTIKRKRYYNIKELLNATIIYQSITGLYEARKRLED

SEQ ID NO: 1059 - protein, 232 aa, Listeria ivanovii
MMSKLILGLDIGISSVGWGVLDESTNEVVDAGVRLFEEATRNGNEDRRGFRSARRLKRRRQHRLERAKGLIENNGFSCTDINKFNPYQARYNAIFGEVTKDELAAALFHLVKRRGTTIDAPEEEVKDVENELSTKMQLEKNAKKLATKYDYICEIQLEKLKENKVVRDHENRFRTEDYVKEARAILENQQEYYPEVTNEFIESYMALIETRRMYYDGPGSEKSPTPYGQYFI

SEQ ID NO: 1060 - protein, 300 aa, Listeria monocytogenes
DDGLNRNLMQLINDSNLSFKSIIEKEQVSTTDKDLQSIVADLAGSPAIKKGILQSLKIVDELVSIMGYPPQTIVVEMARENQTTVKGKNNSRPRYKSLEKAIKEFGSQILKEHPTDNQELRNNRLYLYYLQNGKDMYTGQELDIHNLSNYDIDHIVPQSFITDNSIDNLVLTSSAGNREKGDDVPPLEIVRKRKVFWEKLFQGNLMSKRKFDYLTKAERGGLTEADKATFIHRQLVETRQITKNVANILHQRFNNETDNHGNNMEQVRIVMLKSALVSQFRKQFQLYKVREVNDYHHAHD

SEQ ID NO: 1061 - protein, 782 aa, Listeria monocytogenes
  misc_feature (722)..(722): Xaa can be any naturally occurring amino acid
IFNDLFKQKRKVKKKDLELFLRNINQIESPTIEGLEDSFNASYATYHDLLKVGMKQEILDNPLNTEMLEDIVKILTVFEDKRMIKEQLQQFSDVLDGVVLKKLERRHYTGWGRLSAKLLVGIRDKQSHLTILEYLMNDDGLNRNLMQLINDSNLSFKSIIEKEQVSTTDKDLQSIVADLAGSPAIKKGILQSLKIVDELVSIMGYPPQTIVVEMARENQTTVKGKNNSRPRYKSLEKAIKEFGSQILKEHPTDNQELKNNRLYLYYLQNGKDIYTGQELDIHNLSNYDIDHIVPQSFITDNSIDNLVLTSSAGNREKGDDVPPLEIVRKRKVFWEKLYQGNLMSKRKFDYLTKAERGGLTEADKARFIHRQLVETRQITKNVANILHQRFNNETDNHGNTMEQVRIVTLKSALVSQFRKQFQLYKVREVNDYHHAHDAYLNGVVANTLLKVYPQLEPEFVYGEYHQFDWFKANKATAKKQFYTNIMLFFAQKERIIDENGEILWDKKYLETIKKVLDYRQMNIVKKTEIQKGEFSKATIKPKGNSSKLIPRKENWDPMKYGGLDSPNMAYAVIIEHAKGKKKIVIEKKLIQINIMERKMFEKDEEAFLEEKGYRHPKVLTKLPKYTLYECEKGRRRMLASANEAQKGNQLVLSNHLVSLLYHAKNCEASDGKSLKYTEAHRETFSELLAQVSEFATRYTLADANLSKINNLFEQNKEGDIKXIAQSFVDLMVFNAMGAPASFKFFEATIDRKRYTNLKELLSSTIIYQSITGLYESRKRLDD

SEQ ID NO: 1062 - protein, 1334 aa, Listeria monocytogenes; identical to SEQ ID NO: 109

SEQ ID NO: 1063 - protein, 1334 aa, Listeria monocytogenes
MKNPYTIGLDIGTNSVGWAVLTDQYDLVKRKMKVAGNSDKKQIKKNFWGVRLFDDGQTAVDRRMNRTARRRIERRRNRISYLQEIFAVEMANIDANFFCRLNDSFYVDSEKRNSRHPFFATIEEEVAYHKNYRTIYHLREELVNSSEKADLRLVYLALAHIIKYRGNFLIEGALDTKNTSVDEVYKQFIQTYNQVFMSNIEEGALAKVEENTEVASILAGKFTRREKFERILRLYPGEKSTGMFAQFISLIVGNKGNFQKVFNLVEKTDIECAKDSYEEDLEALLAIIGDEYAELFVAAKNTYNAVVLSSIITVTATETNAKLSASMIERFDAHEKELGELKAFIKLHLPKQYQEIFNNAEIDGYAGYIDGKTKQVDFYKYLKTTLENVEGADYFITKIEEENFLRKQRTFDNGVIPHQLHLEELEAILHQQAKYYPFLREGYDKIKSLVTFRIPYFVGPLANGQSEFAWLTRKDDGEIRPWNIEEKVDFGKSAVDFIEKMTNKDTYLPKENVLPKHSLCYQKYMVYNELTKIRYIDDQGKTNYFSGREKQQIFNDLFKQKRKVKKKDLELFLRNINHIESPTIEGLEDSFNASYATYHDLLKVGLKQEILDNPLNTEILEDIVKILTVFEDKRMIKEQLEQFSDVLDGVVLKKLERRHYTGWGRLSAKLLVGIRDKQSHLTILDYLMNDDGLNRNLMQLINDSNLSFKSIIEKEQVSTTDKDLQSIVADLAGSPAIKKGILQSLKIVDELVSIMGYPPQTIVVEMARENQTTGKGKNNSKPRYKSLEKAIKDFGSQILKEHPTDNQELKNNRLYLYYLQNGKDIYTGQELDIHNLSNYDIDHIVPQSFITDNSIDNLVLTSSAGNREKGGDVPPLEIVRKRKVFWEKLYQGNLMSKRKFDYLTKAERGGLTEADKARFIHRQLVETRQITKNVANILHQRFNKETDNHGNTMEQVRIVTLKSALVSQFRKQFQLYKVREVNDYHHAHDAYLNGVVANTLLKVYPQLEPEFVYGEYHQFDWFKANKATAKKQFYTNIMLFFAQKERIIDENGEILWDKKYLETIKKVLDYRQINIVKKTEIQKGEFSKATIKPKGNSSKLIPRKENWDPMKYGGLDSPNMAYAVIIEHAKGKKKIVIEKKLIQINIMERKMFEKDEEAFLEEKGYHQPKVLTKLPKYTLYECEKGRRRMLSSANEAQKGNQLVLSNHLVSLLYHAKNCEASDGKSLKYIEAHRETFSELLAQVSEFATKYTLADANLSKINNLFEQNKEGDIKAIAQSFVDLMAFNAMGAPASFKFFEATIDRKRYTNLKELLSSTIIYQSITGLYESRKRLDD

SEQ ID NO: 1064 - protein, 1334 aa, Listeria monocytogenes
MKNPYTIGLDIGTNSVGWAVLTDQYDLVKRKMKVAGNSDKKQIKKNFWGVRLFDDGQTAVDRRMNRTARRRIERRRNRISYLQEIFAVEMANIDANFFCRLNDSFYVDSEKRNSRHPFFATIEEEVAYHKNYRTIYHLREELVNSSEKADLRLVYLALAHIIKYRGNFLIEGALDTKNTSVDEVYKQFIQTYNQVFMSNIEEGALAKVEENTEVASILAGKFTRREKFERILRLYPGEKSTGMFAQFISLIVGNKGNFQKVFNLVEKTDIECAKDSYEEDLEALLAIIGDEYAELFVAAKNTYNAVVLSSIITVTATETNAKLSASMIERFDAHEKELGELKAFIKLHLPKQYQEIFNNAEIDGYAGYIDGKTKQVDFYKYLKTTLENVEGADYFITKIEEENFLRKQRTFDNGVIPHQLHLEELEAILHQQAKYYPFLREGYDKIKSLVTFRIPYFVGPLANGQSEFAWLTRKDDGEIRPWNIEEKVDFGKSAVDFIEKMTNKDTYLPKENVLPKHSLCYQKYMVYNELTKIRYIDDQGKTNYFSGREKQQIFNDLFKQKRKVKKKDLELFLRNINHIESPTIEGLEDSFNASYATYHDLLKVGLKQEILDNPLNTEILEDIVKILTVFEDKRMIKEQLEQFSDVLDGVVLKKLERRHYTGWGRLSAKLLVGIRDKQSHLTILDYLMNDDGLNRNLMQLINDSNLSFKSIIEKEQVSTTDKDLQSIVADLAGSPAIKKGILQSLKIVDELVSIMGYPPQTIVVEMARENQTTGKGKNNSKPRYKSLEKAIKDFGSQILKEHPTDNQELKNNRLYLYYLQNGKDIYTGQELDIHNLSNYDIDHIVPQSFITDNSIDNLVLTSSAGNREKGGDVPPLEIVRKRKVFWEKLYQGNLMSKRKFDYLTKAERGGLTEADKARFIHRQLVETRQITKNVANILHQRFNKETDNHGNTMEQVRIVTLKSALVSQFRKQFQLYKVREVNDYHHAHDAYLNGVVANTLLKVYPQLEPEFVYGEYHQFDWFKANKATAKKQFYTNIMLFFAQKERIIDENGEILWDKKYLETIKKVLDYRQINIVKKTEIQKGEFSKATIKPKGNSSKLIPRKENWDPVKYGGLDSPNMAYAVIIEHAKGKKKIVIEKKLIQINIMERKMFEKDEEAFLEEKGYHQPKVLTKLPKYTLYECEKGRRRMLSSANEAQKGNQLVLSNHLVSLLYHAKNCEASDGKSLKYIEAHRETFSELLAQVSEFATKYTLADANLSKINNLFEQNKEGDIKAIAQSFVDLMAFNAMGAPASFKFFEATIDRKRYTNLKELLSSTIIYQSITGLYESRKRLDD

SEQ ID NO: 1065 - protein, 1099 aa, Listeria monocytogenes
MKNPYTIGLDIGTNSVGWAVLTDQYDLVKRKMKVAGNSDKKQIKKNFWGVRLFDDGQTAVDRRMNRTARRRIERRRNRISYLQEIFAVEMANIDANFFCRLNDSFYVDSEKRNSRHPFFATIEEEVAYHKNYRTIYHLREELVNSSEKADLRLVYLALAHIIKYRGNFLIEGALDTKNTSVDEVYKQFIQTYNQVFMSNIEEGALAKVEENTEVASILAGKFTRREKFERILRLYPGEKSTGMFAQFISLIVGNKGNFQKVFNLVEKTDIECAKDSYEEDLEALLAIIGDEYAELFVAAKNTYNAVVLSSIITVTATETNAKLSASMIERFDAHEKELGELKAFIKLHLPKQYQEIFNNAEIDGYAGYIDGKTKQVDFYKYLKTTLENVEGADYFITKIEEENFLRKQRTFDNGVIPHQLHLEELEAILHQQAKYYPFLREGYDKIKSLVTFRIPYFVGPLANGQSEFAWLTRKDDGEIRPWNIEEKVDFGKSAVDFIEKMTNKDTYLPKENVLPKHSLCYQKYMVYNELTKIRYIDDQGKTNYFSGREKQQIFNDLFKQKRKVKKKDLELFLRNINHIESPTIEGLEDSFNASYATYHDLLKVGLKQEILDNPLNTEILEDIVKILTVFEDKRMIKEQLEQFSDVLDGVVLKKLERRHYTGWGRLSAKLLVGIRDKQSHLTILDYLMNDDGLNRNLMQLINDSNLSFKSIIEKEQVSTTDKDLQSIVADLAGSPAIKKGILQSLKIVDELVSIMGYPPQTIVVEMARENQTTGKGKNNSKPRYKSLEKAIKDFGSQILKEHPTDNQELKNNRLYLYYLQNGKDIYTGQELDIHNLSNYDIDHIVPQSFITDNSIDNLVLTSSAGNREKGGDVPPLEIVRKRKVFWEKLYQGNLMSKRKFDYLTKAERGGLTEADKARFIHRQLVETRQITKNVANILHQRFNKETDNHGNTMEQVRIVTLKSALVSQFRKQFQLYKVREVNDYHHAHDAYLNGVVANTLLKVYPQLEPEFVYGEYHQFDWFKANKATAKKQFYTNIMLFFAQKERIIDENGEILWDKKYLETIKKVLDYRQINIVKKTEIQKGEFSKATIKPKGIPAN

SEQ ID NO: 1066 - protein, 1334 aa, Listeria monocytogenes
MKNPYTIGLDIGTNSVGWAVLTDQYDLVKRKMKVAGNSDKKQIKKNFWGVRLFDEGETAADRRMNRTARRRIERRRNRISYLQEIFALEMANIDANFFCRLNDSFYVDSEKRNSRHPFFATIEEEVAYHKNYRTIYHLREELVNSSEKADLRLVYLALAHIIKYRGNFLIEGALDTKNTSVDGVYKQFIQTYNQVFISNIEEGTLAKMEENTTVADILAGKFTRKEKLERILQLYPGEKSTGMFAQFISLIVGSKGNFQKVFDLVEKTDIECAKDSYEEDLEALLAIIGDEYAELFVAAKNTYNAVVLSSIITVTDTETNAKLSASMIERFDAHEKDLSELKAFIKLHLPKQYEEIFSNVAIDGYAGYIDGKTKQVDFYKYLKTLLENIEGADYFIAKIEEENFLRKQRTFDNGAIPHQLHLEELEAILHQQAKYYPFLKEAYDKIKSLVTFRIPYFVGPLANGQSDFAWLTRKADGEIRPWNIEEKVDFGKSAVDFIEKMTNKDTYLPKENVLPKHSLYYQKYMVYNELTKVRYIDDQGKTNYFSGQEKQQIFNDYFKQKRKVSKKDLEQFLRNMSHIESPTIEGLEDSFNSSYATYHDLLKVGIKQEVLENPLNTEMLEDIVKILTVFEDKRMIKEQLQQFSDVLDGAVLKKLERRHYTGWGRLSAKLLVGIRDKQSHLTILDYLMNDDGLNRNLMQLINDSNLSFKSIIEKEQVSTTDKDLQSIVADLAGSPAIKKGILQSLKIVDELVSIMGYPPQTIVVEMARENQTTVKGKNNSRPRYKSLEKAIKEFGSQILKEHPTDNQELRNNRLYLYYLQNGKDMYTGQELDIHNLSNYDIDHIVPQSFITDNSIDNLVLTSSAGNREKGDDVPPLEIVRKRKVFWEKLFQGNLMSKRKFDYLTKAERGGLTEADKATFIHRQLVETRQITKNVANILHQRFNNETDNHGNNMEQVRIVMLKSALVSQFRKQFQLYKVREVNDYHHAHDAYLNGVVANTLLKVYPQLEPEFVYGEYHQFDWFKANKATAKKQFYTNIMLFFAQKERIIDENGEILWDKKYLETIKKVLDYRQMNIVKKTEIQKGEFSKATIKPKGNSSKLIPRKENWDPMKYGGLDSPNMAYAVIIEHAKGKKKVVFEKKIIRITIMERKAFEKDEKSFLEKQGYRQPKVLTKLPKYTLYECENGRRRMLASANEAQKGNQQVLKGQLITLLHHAKNCEASDGKSLDYIESNREMFGELLAHVSEFAKRYTLADANLSKINQLFEQNKDNDIKVIAQSFVNLMAFNAMGAPASFKFFEATIERKRYTNLKELLSATIIYQSITGLYEARKRLDG

SEQ ID NO: 1067 - protein, 1334 aa, Listeria monocytogenes
MKNPYTIGLDIGTNSVGWAVLTNQYDLVKRKMKVAGNSDKKQIKKNFWGVRLFDDGQTAVDRRMNRTARRRIERRRNRISYLQEIFAVEMANIDANFFCRLNDSFYVDSEKRNSRHPFFATIEEEVAYHKNYRTIYHLREELVNSSEKADLRLVYLALAHIIKYRGNFLIEGALDTKNTSVDGVYEQFIQTYNQVFMSNIEEGTLAKVEENIEVANILAGKFTRREKFERILQLYPGEKSTGMFAQFISLIVGSKGNFQKVFDLIEKTDIECAKDSYEEDLEALLAIIGDEYAELFVAAKNTYNAVVLSSIITVTATETNAKLSASMIERFDAHEKDLGELKAFIKLHLPKQYQEIFNNAAIDGYAGYIDGKTKQVDFYKYLKTILENIEGADYFIAKIEEENFLRKQRTFDNGAIPHQLHLEELEAIIHQQAKYYPFLREDYEKIKSLVTFRIPYFVGPLAKGQSEFAWLTRKADGEIRPWNIEEKVDFGKSAVDFIEKMTNKDTYLPKENVLPKHSLCYQKYMVYNELTKVRYIDDQGKTNYFSGQEKQQIFNDLFKQKRKVKKKDLELFLRNINHIESPTIEGLEDSFNASYATYHDLLKVGMKQEILDNPLNTEMLEDIVKILTVFEDKPMIKEQLQQFSDVLDGGVLKKLERRHYTGWGRLSAKLLVGIREKQSHLTILDYLMNDDGLNRNLMQLINDSNLSFKSIIEKEQVSTTDKDLQSIVADLAGSPAIKKGILQSLKIVDELVSIMGYPPQTIVVEMARENQTTGKGKNNSKPRYKSLEKAIKEFGSKILKEHPTDNQELKNNRLYLYYLQNGKDMYTGQELDIHNLSNYDIDHIVPQSFITDNSIDNLVLTSSAGNREKGGDVPPLEIVRKRKVFWEKLYQGNLMSKRKFDYLTKAERGGLTDADKARFIHRQLVETRQITKNVANILHQRFNNETDNHGNTMEQVRIVTLKSALVSQFRKQFQLYKVREVNDYHHAHDAYLNGVVANTLLKVYPQLEPEFVYGEYHQFDWFKANKATAKKQFYTNIMLFFGQKERIIDENGEILWDKKYLETIKKVLDYRQMNIVKKTEIQKGEFSKATIKPKGNSSKLIPRKENWDPMKYGGLDSPNMAYAVIIEHAKGKKKLIFEKKIIRITIMERKMFEKDEEAFLEEKGYRHPKVLTKLPKYTLYECEKGRRRMLASANEAQKGNQLVLSNHLVSLLYHAKNCEASDGKSLKYIEAHRETFSELLAQVSEFATRYTLADANLSKINNLFEQNKEGDIQAIAQSFVDLMAFNAMGAPASFKFFEATIDRKRYTNLKELLSSTIIYQSITGLYESRKRLDD

SEQ ID NO: 1068 - protein, 874 aa, Listeria seeligeri; identical to SEQ ID NO: 175

SEQ ID NO: 1069 - protein, 1087 aa, Listeriaceae bacterium
MKKLVLGLDIGVASVGWGIIDAENGDVVDTGVRLFSSRDASENESRRTSRQSRRLSRRKKHRRERIKQLLLAHDMDICDIVNENPYELRVKGLNEKLEVSEIYVALTHLAKRRGVSYLDDVVEEGGTIKSEHLNKNMEEIKSGKMPCEIQLERFEKYGQVRGMIEINQDTEESSFLVNIFRTSDYIKEAKTILATQQKFHKQITNEFIDEYIHIMASKRDYFIGPGNEKSRTDYGVYRTNGDTWDNLFEILIGKCSVFPEETRAARSSYVAQEFNLLNDLNNLKISNLESGKLSASQKHDIVEKVKNSKKFGTKDLLKYIASVCECKIEDIGGCRVDKNRKPIMHTFENYRKVHNALNEAGVDLRLSETDYDELMKIMTLNSETLEIKKQCKEKLPQLTEDYLNVCLVLNKKGAFSGWHALSLKAMKLMMPELYGTSKNQMQIIHTMQLGKAYLKPLNQQKYLNSEAILEEIYNPIAARSIRQTIKVTNAILKKYGHLDSVIIEMPRDYQTSEDERKMIEKMQKENEKEKKAALKRAREEYPFPDEAFRNHKELATKLRLWYQQDQFCVYSGRKISVVDLVRNPNQFEIDHIIPQSVSLDDSLNNKVLCFSEENQKKGQQTPFYYHKGKSGNWTYEQYKLFVEKLFDKKKISNKKRELLLFEEDINKWDVRRGFIARNLVDTRYASRVILNSYQQYFGNHEMGTKVKVVRGKFTSQLRKKWRIFKDRNESHSHHAIDALIVAATANLRLWKKNTLGVSDEGKVYDKETGEILPFEKLTESEYNEMMNKEPYLNFKTKLQNIETKVKYSYRVSKKVNRKISDATIYSTRERDGIDYIVGKIKNIYDVKTYKDQFLKRYKKNKEQFLMYQHDPQTFAILENIMATYQDAENPFLAYKKEYGVIRKYSKKGGGSPVTSLKFIDKVLGQKIDLTAKNQAALPKNKKVVLQSITPYRADVYYDEIDKRYHLIGVKYSLFSFSKQGYVINPIAYQKLLEKEQIHSEMKFCFSLYREDIIEFGEDPDSLTRYRFWSKNESGKNKIEVKPIEKPNFEKQTVLTITKKIKILNKYQTDVLGNSFKAQEEKDPRNIE

SEQ ID NO: 1070 - protein, 1345 aa, Marinilabilia sp.
MKKILGLDLGTTSIGWAFIKEPEKDVVGSEIVDMGVRIVALSSDEENDFAKGNTISINADRTLKRGARRNLQRFKLRRDALLEIFKEMKLIPSNFKYAEDGPSSTFSTLKLRDKAAKEKIELDDLVKVLLQINKKRGYRSSRKAKSEEDDGSAIDSMGIAKELYENDLTPGQWVFEALQKGRKNVPDFYRSDLQEEFKKIVNYQSEFYPDVLNSSFVEDWMGKASTPTKQYFNKKGVHLAENKGKREERRLQEYNWRAVAVNSKIDLSEIALILSQINSQISNSSGYLGAISDRSKELYFKNQTVGQYLYQQIKINPHTRLKGQVFYRQDYLDEFEKIWSVQSGFHPQLNDALKKEIRDITIFFQRRLKSQKHLISNCEFEDYHKVVPKSHPIFQEFRIWQNLNNLTLIKKDNLNEKSELALEDKIALANELAFKREQSVKDALNILGLKSSEWEFNFTKIEGNRTNHAFFEAFAKIIEIEDGEPLDLGNLKADDILDQFSEAFLRIGIDPGLLQVNNDIEGPNYEKQPYIQFWHLLYSSEDDQKLKQNLIKKFGFKPDHAKILASISLQDDHASLSSRAIKKILPHLQSGLIYDKACTYAGYNHSSSFTKEENEKRELSSELDLLKKNSLRNPVVEKILNQMINVVNAILKDPNLGKPDEIRVEMARELKANAEQRKNMTSNIASATRDHEKYREILKKEFGLKRVTKNDLLRYKLWLETDGISLYTGKPIEASKLFSKEYDIEHIIPKTRLFDDSFSNKTICERQLNIDKANVTAFSFLQNKLSGDEFEQYQSRVKSLFGKLSKAKIQKLLMANDKIPEDFIARQLQETRYISKKAKEILFEITRRVSVTTGTITDKLREDWGLVEIMKELNWEKYDKLGLTYTIEGKHGERLNKIKDWSKRNDHRHHAMDALTVALTKPAYIQYLNNLNAKELNGKKSTEIFAIEQKYLKRENGKLCFIPPVENIRTEAKKHLSKVLISYKAKNKVVTINKNRTNKKAGFNEQIALTPRGQLHKETVYGKAFHYSTKFEKIGASFDVQKINAVAKKEEREALLKRLAENGDDPKKAFTGKNSLSKMPIYLDLKRNIKLPEKVKTVVLEQNYTIRKNIDPDLKLDKVIDVGVKRILENRLKEFGGNAKLALSNLDENPIWLNKEKGITIKRVKISGVSNVESLHVKKDHFGEPILDQVGNEIPVDFVSTGNNHHVAIYEDEKGNLQEEVVSFFEAVVRQNQGLPIINKNHSLGWKFLFTLKQNEYFVFPSDDFDPTDVDLMDEENYHLISPNLFRVQKFTTKDYFFRHHLETTVEDKSELKGVSFKRLGLPGLNCIKKIRINHLGKIIQVGEY

SEQ ID NO: 1071 - protein, 1091 aa, Mobiluncus mulieris
MDSRKYRVGIDVGTNSVGFAAVEEDDSGSPTRFLNTMVVIHDSGVDSEQKKYAITRLASAGTARRTRRLYRTRRQRLRELDDFISNELGYPLVNLENFADPYEPWKVRADLATTKLPNDELPEAMSIALRHMARHRGWRSPYQRVEALHLHAEISKEFAALKERVVEKTGDVFSDDATPAEVLVDLMGRQKVRGADGVLSGKLRQSDNANELRKIASVQGIDDETLNRIIDRVFSSKSPKGKASERVGMDALPGQGSKPRALKAMPSFQKFRVVSVICNLRIKDSGGDARPLSMEEKEKLIDYLMSSTTDDHVTWTDVADLLHVKRSQLQGTAKEGFDGERPYTRPPVNSTWSKIKDSKIKSLVALWKTGDVDVQSAIVEALSNASVLEDSRPGADIVVAYLESLDDKELESLDKVGLPAGRASYSEDSLERLTERMLRDDCDLFEARKREFNVADDWKPPADPIYAPVGNPGVDRVLKIVNRLLMAAEREWGAPTQINIEHVRSGFSSELMQREFERENERRRAQNEEAVKAILTEKGGNSRVSKYDITRYYAVKRQHCQCLYCGTPITFSDCELDHIVPRKGVGSTNTRVNLAAACRSCNRDKSNLPFAVWAGKASNFDVSIDDAVSRVKQWQRSQNEGVREFRAFQNEVISRLLKTTEDPEIDSRSLESVAWMARELHHRVEYYFQSKGAQTQVSVYRGAVTAQARKSSGLEDKVKMIGGGGKTRLDRRHHAMDAATIALMTPGISTTLSEKNNLRDAQKFTGQSETWKDYCGRTETARKHFAVWKSNMERLTDLFNDKLENDAIPVVQPLRLRLSNSKAHDDGIGKLDSKKLGSVWSLADIDRAATPQIWTALTRCDDFDPTKGLPENANRVIRAQGVKYESEDNIPVFPSNVAAIAVRDGYAEIGSTIHHARIYRIDDGKKTFYSMIRVFAVDLLKHQAEDLFTVKLPPSAISIRTCEDSLRRALSNGTAEYLGWLVPGDEIIVDTSDKAFHTGQIGDLLRNFPVNSFRLTGFPSNSRLRLKPVLLAGEGLRDDAEDSIKKILLGQGWRPAINVLFSKGKPRIVRRNSLGIERPSSNNGLPFSWEA

SEQ ID NO: 1072 - protein, 1233 aa, Mycoplasma canis
MEKKRKVTLGFDLGIASIGWAIVDSETNQVYKLGSRLFDAPDTNLERRTQRGTRRLLRRRKYRNQKFYNLVKRTEVFGLSSREAIENRFRELSIKYPNIIELKTKALSQEVCPDEIAWILHDYLKNRGYFYDEKETKEDFDQQTVESMPSYKLNEFYKKYGYFKGALSQPTESEMKDNKDLKEAFFFDFSNKEWLKEINYFFNVQKNILSETFIEEFKKIFSFTRDISKGPGSDNMPSPYGIFGEFGDNGQGGRYEHIWDKNIGKCSIFTNEQRAPKYLPSALIFNFLNELANIRLYSTDKKNIQPLWKLSSIDKLNILLNLFNLPISEKKKKLTNANINDIVKKESTKSIMLSVEDIDMIKDEWAGKEPNVYGVGLSGLNIEESAKENKFKFQDLKILNVLINLLDNVGIKFEFKDRNDIIKNLELLDNLYLFLIYQKESNNKDSSIDLFIAKNELLNIENLKLKLKEFLLGAGNEFENHNSKTHSLSKKAIDAILPKLLDNNEGWNLEAIKNYDEEIKSQIEDNSSLMAKQDKKYLNDNFLKDAILPPNVKVTFQQAILIFNKIIQKFSKDFEIDKVVIELAREMTQDQENDALKGIAKAQKSKKSLVEERLEANNIDKSVFNDKYEKLIYKIFLWISQDFKDPYTGAQISTNEIVNNKVEIDHIIPYSLCFDDSSANKVLVHKQSNQEKSNSLPYEYIKQGHSGWNWDEFTKYVKRVFVNNVDSILSKKERLKKSENLLTTSYDGYDKLGFLARNLNDTRYATILFRDQLNNYAEHHLIDNKKMFKVIAMNGAVTSFIRKNMSYDNKLRLKDRSDFSHHAYDAAIIALFSNKTKTLYNLIDPSLNGIISKRSEGYWVIEDRYTGEIKELKKEDWTSIKNNVQARKIAKEIEEYLIDLDDEVFFSRKTKRKTNRQLYNETIYGIAAKTDEDGITNYYKKEKFSILDDKDIYLRLLREREKFVINQSNPEVIDQIIEIIESYGKENNIPSRDEAINIKYTKNKINYNLYLKQYMRSLTKSLDQFSEEFINQMIANKTFVLYNPTKNTTRKIKFLRLVNDVKINDIRKNQVINKFNGKNNEPKAFYENINSLGAIVFKNSANNFKTLSINTQIAIFGDKNWDIEDFKTYNMEKIEKYKEIYGIDKTYNFHSFIFPGTILLDKQNKEFYYISSIQTVRDIIEIKFLNKIEFKDENKNPDTSKTPKRLMFGIKSIMNNYEQVDISPFGINKKIFE

SEQ ID NO: 1073 - protein, 1233 aa, Mycoplasma canis
MEKKRKVTLGFDLGIASVGWAIVDSETNQVYKLGSRLFDAPDTNLERRTQRGTRRLLRRRKYRNQKFYNLVKRTEVFGLSSREAIENRFRELSIKYPNIIELKTKALSQEVCPDEIAWILHDYLKNRGYFYDEKETKEDFDQQTIESMPSYKLNEFYKKYGYFKGALSQPTESEMKDNKDLKEAFFFDFSNKEWLKEINYFFNVQKNILSETFIEEFKKIFSFTRDISKGPGSDNMPSPYGIFGEFGDNGQGGRYEHIWDKNIGKCSIFTNEQRAPKYLPSALIFNFLNELANIRLYSTDKKNIQPLWKLSSIDKLNILLNLFNLPISEKKKKLTSANINDIVKKESTKSIMLSVEDIDMIKDEWAGKEPNVYGVGLSGLNIEESAKENKFKFQDLKILNVLINLLDNVGIKFEFKDRNDIIKNLELLDNLYLFLIYQKESNNKDSSIDLFIAKNESLNIENLKLKLKEFLLGAGNEFENHNSKTHSLSKKAIDAILPKLLDNNEGWNLEAIKNYDEEIKSQIEDNSFLMAKQDKKYLNDNFLKDAILPPNVKVTFQQAILIFNKIIQKFSKDFEIDKVVIELAREMTQDQENDALKGIAKAQKSKKSLVEERLEANNIDKSVFNEKYEKLIYKIFLWISQDFKDPYTGAKISANEIVDNKVEIDHIIPYSLCFDDSSANKVLVHKQSNQEKSNSLPYEYIKQGHSGWNWDEFTKYVKRVFVNNVDSILSKKERLKKSENLLTTSYDGYDKLGFLARNLNDTRYATILFRDQLNNYAEHHLIDDKKMFKVIAMNGAVTSFIRKNMSYDNKLRLKNRNDFSHHAYDAAIIALFSNKTKTLYNLIDPSLNGIISKRSEGYWVIEDRYTGEIKELKKEDWTSIKNNVQARKIAKEIEEYLIDLDDEVFFSRKTKRKTNRQLYNETIYGIAAKTDEDGITNYYKKEKLSILDDKDIYLRLLREREKFVINQSNPEVIDQIIEIIESYGKENNIPSRDEAINIKYTKNKINYNLYLKQYMRSLTKSLDQFSEEFINQMIANKTFVLYNPTKNTTRKIKFLRLVNDVKINDIRKNQVINKFNGKNNEPKAFYENINSLGAIVFKNSANNFKTLSINTQIAIFGDKNWDIEDFKTYNMEKIEKYKEIYGIDKTYNFHSFIFPGTILLDKQNKEFYYISSIQTVRDIIEIKFLNKIEFKDENKNQDTSKTPKRLMFGIKSIMNNYEQVDISPFGINKKIFE

SEQ ID NO: 1074 - protein, 1233 aa, Mycoplasma canis; identical to SEQ ID NO: 242

SEQ ID NO: 1075 - protein, 1233 aa, Mycoplasma canis
MEKKRKVTLGFDLGIASVGWAIVDSETNQVYKLGSRLFDAPDTNLERRTQRGTRRLLRRRKYRNQKFYNLVKRTEVFGLSSREAIENRFRELSIKYPNIIELKTKALSQEVCPDEIAWILHDYLKNRGYFYDEKETKEDFDQQTVESMPSYKLNEFYKKYGYFKGALSQPTESEMKDNKDLKEAFFFDFSNKEWLKEINYFFNVQKNILSETFIEEFKKIFSFTRDISKGPGSDNMPSPYGIFGEFGDNGQGGRYEHIWDKNIGKCSIFTNEQRAPKYLPSALIFNFLNELANIRLYSTDKKNIQPLWKLSSVDKLNILLNLFNLPISEKKKKLTSTNINDIVKKESIKSIMISVEDIDMIKDEWAGKEPNVYGVGLSGLNIEENAKENKFKFQDLKILNVLINLLDNVGIKFEFKDRNDIIKNLELLDNLYLFLIYQKESNNKDSSIDLFIAKNKSLNIENLKLKLKEFLLGAGNEFENHNSKSHSLSKKAIDAILPKLLDNNEGWNLEAIKNYDEEIKSQIEDNSSLMAKQDKKYLNDNFLKDAILPPNVKVTFQQAILIFNKIIQKFSKDFEIDKVVIELAREMTQDQENDALKGMAKAQKSKKSLVEERLEANNIDKSVFNDKYEKLIYKIFLWISQDFKDPYTGAQISVNEIVNNKVEIDHIIPYSLCFDDSSANKVLVHKQSNQEKSNSLPYEYIKQGHSGWNWDEFTKYVKRVFVNNVDSILSKKERLKKSENLLTTSYDGYDKLGFLARNLNDTRYATILFRDQLNNYAEHHLIDNKKMFKVIAMNGAVTSFIRKNMSYDNKLRLKDRSDFSHHAYDAAIIALFSNKTKTLYNLIDPSLNGIISKRSEGYWVIEDRYTGEIKELKKEDWTSIKNNVQARKIAKEIEEYLIDLDDEVFFSRKTKRKTNRQLYNETIYGIAAKTDEDGITNYYKKEKFSILDDKDIYLRLLREREKFVINQSNPEVIDQIIEIIESYGKENNIPSRDEAINIKYTKNKINYNLYLKQYMRSLTKSLDKFSEEFINQMIANKTFVLYNPTKNTTRKIKFLRLVNDVKINDIRKNQVINKFNGKNNEPKAFYENINSLGAIVFKNSANNFKTLSINTQIAIFGDKNWDIEDFKTYNMEKIEKYKEIYGIDKTYNFHSFIFPGTILLDKQNKEFYYISSIQTVRDIIEIKFLNKIEFKDENKNQDTSKTPKRLMFGIKSIMNNYEQVDISPFGINKKIFE

SEQ ID NO: 1076 - protein, 1233 aa, Mycoplasma canis
MEKKRKVTLGFDLGIASVGWAIVDSETNQVYKLGSRLFDAPDTNLERRTQRGTRRLLRRRKYRNQKFYNLVKRTEVFGLSSREAIENRFRELSIKYPNIIELKTKALSQEVCPDEIAWILHDYLKNRGYFYDEKETKEDFDQQTVESMPSYKLNEFYKKYGYFKGALSQPTESEMKDNKDLKEAFFFDFSNKEWLKEINYFFNVQKNILSETFIEEFKKIFSFTRDISKGPGSDNMPSPYGIFGEFGDNGQGGRYEHIWDKNIGKCSIFTNEQRAPKYLPSALIFNFLNELANIRLYSTDKKNIQPLWKLSSVDKLNILLNLFNLPISEKKKKLTSTNINDIVKKESIKSIMLSVEDIDMIKYEWAGKEPNVYGVGLSGLNIEESAKENKFKFQDLKILNVLINLLDNVGIKFEFKDRNDIIKNLELLDNLYLFLIYQKESNNKDSSIDLFIAKNKSLNIENLKLKLKEFLLGAGNEFENHNSKTHSLSKKAIDAILPKLLDNNEGWNLEAIKNYDEEIKSQIEDNSSLMAKQDKKYLNDNFLKDAILPPNVKVTFQQAILIFNKIIQKFSKDFEIDKVVIELAREMTQDQENDALKGIAKAQKSKKSLVEERLEANNIDKSVFDDKYEKLIYKIFLWISQDFKDPYTGAKISANEIVNNKVEIDHIIPYSLCFDDSSANKVLVHKQSNQEKSNSLPYEYIKQGHSGWNWDEFTKYVKRVFVNNVDSILSKKERLKKSENLLTTSYDGYDKLGFLARNLNDTRYATILFRDQLNNYAEHHLIDNKKMFKVIAMNGAVTSFIRKNMSYDNKLRLKDRSDFSHHAYDAAIIALFSNKTKTLYNLIDPSLNGIISKRSEGYWVIEDRYTGEIKELKKEDWTSIKNNVQARKIAKEIEEYLIDLDDEVFFSRKTKRKTNRQLYNETIYGIAAKTDEDGITNYYKKEKFSILDDKDIYLRLLREREKFVINQSNPEVIDQIIEIIESYGKENNIPSRDEAINIKYTKNKINYNLYLKQYMRSLTKSLDQFSEEFINQMIANKTFVLYNPTKNTTRKIKFLRLVNDVKINDIRKNQVINKFNGKNNEPKAFYENINSLGAIVFKNSANNFKTLSINTQIAIFGDKNWDIEDFKTYNMEKIEKYKEIYGIDKTYNFHSFIFPGTILLDKQNKEFYYISSIQTVRDIIEIKFLNKIEFKDENKNQDTSKTPKRLMFGIKSIMNNYEQVDISPFGINKKIFE

SEQ ID NO: 1077 - protein, 1239 aa, Mycoplasma cynos
MEEKRKVTLGFDLGVASVGWAIVDSETNEVYKLGSRLFDIPDTNIDRRAKRGSRRLVRRRSYRNQKFYNLIKRTKTFGFLDKEAIEKEFVLLSIKYPNIIELKVKGLQEEVSKSEAVWILHDYLKNRGYFYDDKEEKDDLENPSIESMPSYKLYEFYKEYGYFKGALSSPTESEKNKDSDLEKAIFFNFSNKEWTKEINHFFKIQKNIFSEDFKAKFMEFFSFIRDISKGPGSENMPSQYSIFGKYGDDGMGGKYQHIWDKNIGKCSIFKDKVRAPKYLPSALFFNLLNELSNIRLYSVDKREKSVLWRLSSKDKINIILNILQIILFKNDGKISNLDINKIVKNESIKSIILNEIDLDLIKDMWFEKEPNVYGIGLSGLNIEENKKENRFKFQDLKIFSVFIDLLKKSNINIEFNNEKDIIHNLKLLDELYFFLITQKYSRDKYGSIKKFILNNKSFNIDNLDEKLNIFLSISDDEFDNHNSKTHSLSKEAIYFIFPKLLHNNEGWNLEAIKNYDIDVREEISKHSFGIKKQDKKYLDDAFLDDAILPPSVKVTIKQSILIFNKIIKKFSNKFQIDNVVIELAREMTQEKEMDAQKSLNRLKKSRKKIIEERLNANNIDSKMFRDKTGEISPNYIYKIYLWISQNFKDPYTGENISANDILKNNVEIDHIIPYSLCFDDSSSNKVLVFKHSNQSKGNFLPFDMISTFSENSVWNWKEYTQYVEKTFKTNLESILDKKERVKKADNLLTSSYDGYDKLGFLARNLNDTRYATILFRDQLINYSENHLIDSKKMFKVIAMNGGVTSFIRKNMSFDSGLKVKDRSIFSHHAYDAAIIALFSNKTKILYNLINPSLDGIISKRSEGYWVLEDRLTGEIRKLNYNDWQSIKNNVEVKKIAREIESHLSNLDNVVMFSRKSKRKTNKELYNETLYGIATRIDENGIKNYYKKEKFNILEDENIYLRLLNERENFIINRSNPEVIDAIIEIFETIDKNKIPARDVAKNIKYTDNKIKYNLYLKDYMRKLVDEFPDKFRKDFIEQMIAKKIFILFNPIKNTTRKIKSLRSINNNKIEDIRKKQVLEKFNTAKNEPRSFYESLNSLGAIIFKNNLNIYKKMSISSQIATFGDKNWKIDDINTYNKEKLNKYKEIYGIDETYDFYSFIFPGTILLDEKNKEFLYISSIQTLKDKIELKFLDRIEFEKKNVNSNLKPKIKREIISTKKLMSDYKIIKISPLGINKKIFE

SEQ ID NO: 1078 - protein, 1269 aa, Mycoplasma gallisepticum
MNNSIKSKPEVTIGLDLGVGSVGWAIVDNETNIIHHLGSRLFSQAKTAEDRRSFRGARRLIRRRKYKLKRFINLIWKYNSYFGFKNKEDILNNYQEQQKLHNTVLNLKLEALNAKIDPKALSWILHDYLKNRGHFYEDNRDFNVYPTEELANYFGEYGYYKGIIDSKEDNDDKLEEGLTKYKFSNQHWLEEIKKVLSNQTGLPEKFKEEYESLFSYVRNYSEGPGSINSVSPYGIYHLDEKEGKVVQKYNNIWDKTIGKCSIFPDEYRAPKNSPIAMIFNEINELSTIRSYSIYLTGWFINQEFKKAYLNKLLDLLIKTNSEKPIDARQFKKLREETIAESIGKETLKDVEREEKLEKEDHKWKLKGLKLNTNGKIQYNDLSSLAKFVHKLKQHLKLDFLLEDQYTTLDKINFLQSLFVYLGKHLRYSNRVDSANLKEFSDSNKLFERVLQEQKDDLFKLFEQTDKDDEKILAQTHSLSTKAMLLAITRMTNLDNDEDNQKNNDKGWNFEAIKNFDQKFIDITKKNNNLSLKQDKRYLDDRFINDAILSPGVKRILREATKVFNAILKQFSEEYDVTKVVIELARELSEEKELENTKNYEKLIKKNSDKISERLEALDIAEDKIEDILKSPTKSYKVLLWLQQDHIDPYSQKEIAFEDILTKTEKTEIDHIIPYSISFDDSSSNKLLVLAESNQAKSNQTPYEFITSGNAGIKWEDYEAYCRKFKDGDTSLLDSTQRSKKFAKMMKTDTSSKYDIGFLARNLNDTRYATIVFRDALKDYANNHLVEDKPMFKVVCINGGVTSFLRKNFDKSWYAKKDRDKNIHHAVDASIISIFSNETKTLFNQLTQFADYKLFKNTDGSWKKIDPKTGVVTEVTDENWKQIRVRNQVSEIAKVINKCIQDSNIERKARYSRKIENKTNISLFNDTVYSAKKVGYEDQIKRKNLKTLDIHESAEENKNSKVKKQFVYRKLVNVSLLNNDKLADLFAEKEDILMYRANPWVINLAEQIFNEYTENKKIKSQNVFEKYMLDLTKEFPEKFSEAFVKSMLRNKTAIIYNVEKKVVHRIKRLKILSSELKENKLSNVIIRSKNESGTKLSYQDTINSIALMIMRSIDPTAKKQYIRVPLNTLNLHLGDQDFDLHNIDAYLKKPKFVKYLKANEIGDEYKPWRVLTSGTLLIHKKDKKLMYISSFQNLKDVIEIKNLIETEYKENDDSDPKKKKKANRFLMTLSTILNDYILLDAKDNFDILGLSKNRIDEILNSKLGLDKITK

SEQ ID NO: 1079 - protein, 1224 aa, Mycoplasma gallisepticum
MNNSIKSKPEVTIGLDLGVGSVGWAIVDNETNIIHHLGSRLFSQAKTAEDRRSFRGARRLIRRRKYKLKRFINLIWKYNSYFGFKNKEDILNNYQEQQKLHNTVLNLKLEALNAKIDPKALSWILHDYLKNRGHFYEDNRDFNVYPTEELANYFGEYGYYKGIIDSKEDNDDKLEEGLTKYKFSNQHWLEEIKKVLSNQTGLPEKFKEEYESLFSYVRNYSEGPGSINSVSPYGIYHLDEKEGKVVQKYNNIWDKTIGKCSIFPDEYRAPKNSPIAMIFNEINELSTIRSYSIYLTGWFINQEFKKAYLNKLLDLLIKTNSEKPIDARQFKKLREETIAESIGKETLKDVEREEKLEKEDHKWKLKGLKLNTNGKIQYNDLSSLAKFVHKLKQHLKLDFLLEDQYTTLDKINFLQSLFVYLGKHLRYSNRVDSANLKEFSDSNKLFERVLQEQKDDLFKLFEQTDKDDEKILAQTHSLSTKAMLLAITRMTNLDNDEDNQKNNDKGWNFEAIKNFDQKFIDITKKNNNLSLKQDKRYLDDRFINDAILSPGVKRILREATKVFNAILKQFSEEYDVTKVVIELARELSEEKELENTKNYEKLIKKNSDKISERLEALDIAEDKIEDILKSPTKSYKVLLWLQQDHIDPYSQKEIAFEDILTKTEKTEIDHIIPYSISFDDSSSNKLLVLAESNQAKSNQTPYEFITSGNAGIKWEDYEAYCRKFKDGDTSLLDSTQRSKKFAKMMKTDTSSKYDIGFLARNLNDTRYATIVFRDALKDYANNHLVEDKPMFKVVCINGGVTSFLRKNFDKSWYAKKDRDKNIHHAVDASIISIFSNETKTLFNQLTQFADYKLFKNTDGSWKKIDPKTGVVTEVTDENWKQIRVRNQVSEIAKVINKCIQDSNIERKARYSRKIENKTNISLFNDTVYSAKKVGYEDQIKRKNLKTLDIHESAEENKNSKVKKQFVYRKLVNVSLLNNDKLADLFAEKEDILMYRANPWVINLAEQIFNEYTENKKIKSQNVFEKYMLDLTKEFPEKFSEAFVKSMLRNKTAIIYNVEKKVVHRIKRLKILSSELKENKLSNVIIRSKNESGTKLSYQDTINSIALMIMRSIDPTAKKQYIRVPLNTLNLHLGDQDFDLHNIDAYLKKPKFVKYLKANEIGDEYKPWRVLTSGTLLIHKKDKKLMYISSFQNLKDVIEIKNLIETEYKENDDSDPKKRRKQIGS

SEQ ID NO: 1080 - protein, 1269 aa, Mycoplasma gallisepticum; identical to SEQ ID NO: 133

SEQ ID NO: 1081 - protein, 226 aa, Mycoplasma iowae
MSNKKKITIGLDIGVSSVGWSILREDNVLIDYGSRLFPDAANAKDGKLENEARRSHRSMRRRIRRIKTRKNDLIKLLIKYNIISDQDELAKILEQGIVNETGNVPIVEIKYKGLKEKLSKEELLICLYHYIHKRGYFYITEEDLKENGENINRLPTEIQYDFYMKNGYYIGNEDNQKFSNLIWVKEIEKFLSKQSLDSNFVDEYISLFRRVRDYSDGPGSEKSPTP

SEQ ID NO: 1082 - protein, 1304 aa, Mycoplasma synoviae
MLNNVQNLWKYLLLLIFDKKIIFLFKIKVILIRRYMENNNKEKIVIGFDLGVASVGWSIVNAETKEVIDLGVRLFSEPEKADYRRAKRTTRRLLRRKKFKREKFHKLILKNAEIFGLQSRNEILNVYKDQSSKYRNILKLKINALKEEIKPSELVWILRDYLQNRGYFYKNEKLTDEFVSNSFPSKKLHEHYEKYGFFRGSVKLDNKLDNKKDKAKEKDEEEESDAKKESEELIFSNKQWINEIVKVFENQSYLTESFKEEYLKLFNYVRPFNKGPGSKNSRTAYGVFSTDIDPETNKFKDYSNIWDKTIGKCSLFEEEIRAPKNLPSALIFNLQNEICTIKNEFTEFKNWWLNAEQKSEILKFVFTELFNWKDKKYSDKKFNKNLQDKIKKYLLNFALENFNLNEEILKNRDLENDTVLGLKGVKYYEKSNATADAALEFSSLKPLYVFIKFLKEKKLDLNYLLGLENTEILYFLDSIYLAISYSSDLKERNEWFKKLLKELYPKIKNNNLEIIENVEDIFEITDQEKFESFSKTHSLSREAFNHIIPLLLSNNEGKNYESLKHSNEELKKRTEKAELKAQQNQKYLKDNFLKEALVPLSVKTSVLQAIKIFNQIIKNFGKKYEISQVVIEMARELTKPNLEKLLNNATNSNIKILKEKLDQTEKFDDFTKKKFIDKIENSVVFRNKLFLWFEQDRKDPYTQLDIKINEIEDETEIDHVIPYSKSADDSWFNKLLVKKSTNQLKKNKTVWEYYQNESDPEAKWNKFVAWAKRIYLVQKSDKESKDNSEKNSIFKNKKPNLKFKNITKKLFDPYKDLGFLARNLNDTRYATKVFRDQLNNYSKHHSKDDENKLFKVVCMNGSITSFLRKSMWRKNEEQVYRFNFWKKDRDQFFHHAVDASIIAIFSLLTKTLYNKLRVYESYDVQRREDGVYLINKETGEVKKADKDYWKDQHNFLKIRENAIEIKNVLNNVDFQNQVRYSRKANTKLNTQLFNETLYGVKEFENNFYKLEKVNLFSRKDLRKFILEDLNEESEKNKKNENGSRKRILTEKYIVDEILQILENEEFKDSKSDINALNKYMDSLPSKFSEFFSQDFINKCKKENSLILTFDAIKHNDPKKVIKIKNLKFFREDATLKNKQAVHKDSKNQIKSFYESYKCVGFIWLKNKNDLEESIFVPINSRVIHFGDKDKDIFDFDSYNKEKLLNEINLKRPENKKFNSINEIEFVKFVKPGALLLNFENQQIYYISTLESSSLRAKIKLLNKMDKGKAVSMKKITNPDEYKIIEHVNPLGINLNWTKKLENNN

SEQ ID NO: 1083 - protein, 1401 aa, Myroides injenensis
MKRILGLDLGTTSIGWAYVHEAENVNETSSIQKVGVRVNPLTTEEQTNFEKGKPITTNASRTLARSARRNLQRYKLRRDNLIQILKENNWINNTTSLTETGNHSTFETYELRNKAASEKLTLDQLSRVLLMLNKKRGYKSSRKVNSKEEGQLIDGMEVAKKLYHEQLTPGQLSLQLMNQGVKKLPDYYRSDLNQELESIWNFQQQFYPNILTDKFKEEINGKGLTSTSSAFWNIYNFNTAENKGSRDEKKKQALQWRSEALSKQLSKEIVAYIIADLNGQIYNSSGYLGAISDRSKELYFNNLTVGQYLFKQLKSNPHTSLKNQVFYRQDYLNEFEKIWETQSKFYPKELTAALKREIRDVIIFYQRKLKSQKGLISFCEFEQKQKTINGKTKTIGHRVIPKSSPLFQEFKIWQQLHNVVLRNKKTNEIVSLADEQKVHLFEELNLKGKLKSNQVLKLIENKPKDWELNYTELEGNNTNKALYNAYLDILDIEGYDVRNELKVKLNKDDIELSDLDVNASEIKEMIFSVFKHLGINTEILEFDATLEDKVFEKQASYQLWHLLYSYEEDNSPTGLDRLYNLLHKKFGFKLNHAKLIGNVLFQDDYGSLSSKAIKNIFPYITENNYYTACELAGYKHSKHSLTKEENETRELKNRLTILPKNSLRNPVVEKIINQMINVVNTLIDEENNILIAQGKEPNFQFDEIRIELARELKKNAKEREELTKSINKSKTDHEKIIKILQKEDGIKNPTRNDIVRFKLYSELKNNGYKDLYTNEYIERKDIFTKEYDIEHIIPQSKLFDDSFSNKTLVRRNVNLKKGNQTAYDFILCEYGQEKANEFETRITNLYNLGKDEGISKSKFKKLLMQESEIGNGFIERDLRETQYIAKKAKSLLLEITRNVISTSGSITDRLREDWGLINVMKELNLQKYRDAGLTEFVKMKDGNKKEVIIDWTKRNDHRHHAMDALTIAFTKHNHIQYLNHLNARKNVNNELHNNIIAIEKLETTLVSDERGNKKRIFKEPIANFRTIAKSHLEAILVSHKAKNKVVTKNINKISGKKISQQTLTPRGQLHKETIYGKIRQYVSKQEKVGPKFTIEVIEQVSNPTYRNLLLKRLEENNNDPKKAFGGKNSLNKNPIYINLEKNIKVPEVLKLVWLEDNYTIRKEISPDLKIDKVIDQGVKQILQNRLAQYKGDSKLAFSNLDANPIWLNEDKGIAIKRVTISGIATAQPLHRKKDHLGQPILDHNGQEIPVDFISTGNNHHVAIYEDENGKLQESVVSHFEAVERVNQKLPIIDKTFNQHLGWKFLFTMKQNELFLFPSDDFNPNEIDLFDKQNYTVISKHLFRIQKLSTKDYSFRHHLETNVEEIKDLKTITWRREGLNGIQNIIKVRTNHLGEIIHIGEY

SEQ ID NO: 1084 - protein, 1466 aa, Myroides odoratus
MKNILGLDLGTNSIGWALVKEDFENKQGEILGLGSRIIPMSQDILGEFGRGNSISQTADRTGYRGVRRLRERHLLRRERLHRVLNILGFLPNHYAKEIDFTKRLGKFINHAEPKLSFDKEFIFKDSFNEMLKDFQQNQPGFIINKHGEEALVPYDWTIYYLRKKALTQKIDKEELAWILLNFNQKRGYYQLRGEEEEENTNKLVEFYSLKIIDVIADNEVNKKGEVWYSLHLENGWIYRRSSKISLVDWKDKVRDFIVTTDVNDDGSEKLDKDGVVKRSFRAPSADDWTLLKKKTEQDIDNSNKTVGAYIYENLLLNPKQKIKGKLVRTIERKFYKDELKQILEKQKEFHQELQNEQLLQDCVRELYKYNEQHQQMLESKDFVHLFLNDIIFYQRPLRSQKSLISNCTLEKRVSRDGVVFPIKVISKSNPYYQEFRLLQWLQNLAIYRKDDDVNVTQEFLNSIESWENLLQFLNAKKEIKQEQLIKFLLEQKGLKGNSLKTAILTYRWNYVTDKVYPMNETRSLIQDKLKKVENVATDFLSFDNEMALWHIIYSVNDKIEYEKALAKFASKHNLDEISFVESFKKFPPFKSDYGSFSEKAIKKLLPLMRFGSVWNKNNIVPSVLDRIDKILTGEYDEKIKIRVREKAEQFQLNQIEDFQNLPLWLAQYVVYDRHSEAEIAGKWNSVKDLENYLKEFKQHSLRNPIVEQIITETLRVVKDIWQQYGNGVQNFFDEIHIELGREMKNTADERKRITNSVTENENTNLRIKALLVELKEDTNIENVRPHSPMQQEILKIYEEGVLNAVENIDEDILKISKTAQPSKSELIRYKLWLEQKYQSPYTGEMIPLSRLFTSDYEIEHVIPQSRYFDDSLSNKVICEAAVNKRKDNQLGLEFIKNHHSEKIELGNGRTAQVLEVEAYESFVKKNYDKNRGKRNKLLLEDVPEKMIERQLNDTRYISKFVTHLLSNIVRKDEVNSKDDGINSKNIIPGNGKITSQLKQDWGLNDVWNELILPRFERMNNLTNSTDFTSTNTNGKIIPTVPLEYSKGFSKKRIDHRHHALDALVIALATRDHVNLLNNESALPKKDRTKEEQKSFRFDLQVNLRNKEKYFNVKEGREKEKFTTFKKPWNTLTQDTRDALENMVVSFKQNLRVINKATNYYESYTDENGNLRLDKYGNPKKELISQKGTNWAIRKSLHKETVSGQIHLDRVKVTKGKIVTATRKSLDSSFNEKSIESITDTGIQKILRNYLKAKDNKPDVAFSPEGIEELNKSISVYNEGKNHQPIIKVRIFEQGSKFPVGETGNKIAKFVEAAKGTNLFFGIYQDKTGKRSYDTIPLNLVIERLKQGLSPVPETNEKGHQLLFHLSPNDLVYVPTIDDNEQLDSNRVYKFTDSSDTTCNFIPSNISAIIFNINSKEQEKRGINYPIQNELGVGSPQSKNQKSFDGFMIKEVCIKLKVDRLGNISKT

SEQ ID NO: 1085 - protein, 241 aa, Neisseria lactamica
MAAFKPNPMNYILGLDIGIASVGWAMVEIDKEENPIRLIDLGVRVFERAEMPKTGDSLAMARRLARSVRRLTRRRAHRLLRARRLLKREGVLQDADFDENGLVKSLPNTPWQLRAAALDRKLTCLEWSAVLLHLIKHRGYLSQRKNEGETADKELGALLKGVADNAHALQTGDFRTPAELALNKFEKESGHIRNQRGDYSHTFSRKDLQAELNLLFEKQKEFGNPHVSDGLKEGIETLLMA

SEQ ID NO: 1086 - protein, 666 aa, Neisseria lactamica
MAAFKPNPMNYILGLDIGIASVGWAMVEVDEEENPIRLIDLGVRVFERAEVPKTGDSLAMARRLARSVRRLTRRRAHRLLRARRLLKREGVLQDADFDENGLVKSLPNTPWQLRAAALDRKLTCLEWSAVLLHLVKHRGYLSQRKNEGETADKELGALLKGVADNAHALQTGDFRTPAELALNKFEKESGHIRNQRGDYSHTFSRKDLQAELNLLFEKQKEFGNPHVSDGLKEDIETLLMAQRPALSGDAVQKMLGHCTFEPAEPKAAKNTYTAERFIWLTKLNNLRILEQGSERPLTDTERATLMDEPYRKSKLTYAQARKLLGLEDTAFFKGLRYGKDNAEASTLMEMKAYHAISRALEKEGLKDKKSPLNLSTELQDEIGTAFSLFKTDKDITGRLKDRVQPEILEALLKHISFDKFVQISLKALRRIVPLMEQGKRYDEACAEIYGDHYCKKNAEEKIYLPPIPADEIRNPVVLRALSQARKVINCVVRRYGSPARIHIETAREVGKSFKDRKEIEKRQEENRKDREKAAAKFREYFPNFVGEPKSKDILKLRLYEQQHGKCLYSGKEINLVRLNEKGYVEIDHALPFSRTWDDSFNNKVLVLGSENQNKGNQTPYEYFNGKDNSREWQEFKARVETSRFPRSKNNGFCCKNSMKKDLKNAT

SEQ ID NO: 1087 - protein, 828 aa, Neisseria lactamica
MLGHCTFEPAEPKAAKNTYTAERFIWLTKLNNLRILEQGSERPLTDTERATLMDEPYRKSKLTYAQARKLLGLEDTAFFKGLRYGKDNAEASTLMEMKAYHAISRALEKEGLKDKKSPLNLSTELQDEIGTAFSLFKTDKDITGRLKDRVQPEILEALLKHISFDKFVQISLKALRRIVPLMEQGKRYDEACAEIYGDHYGKKNTEEKIYLPPIPADEIRNPVVLRALSQARKVINAVVRRYDSPARIHIETAREVGKSFKDRKEIEKRQEENRKDREKAAAKFREYFPNFVGEPKSKDILKLRLYEQQHGKCLYSGKEINLVRLNEKGYVEIDHALPFSRTWDDSFNNKVLVLGSENQNKGNQTPYEYFNGKDNSREWQEFKARVETSRFPRSKKQRILLQKFDEEGFKERNLNDTRYVNRFLCQFVADHILLTGKGKRRVFASNGQITNLLRGFWGLRKVRAENDRHHALDAVVVACSTVAMQQKITRFVRYKEMNAFDGKTIDKETGEVLHQKAHFPQPWEFFAQEVMIRVFGKPDGKPEFEEADTSEKLRTLLAEKLSSRPEAVHEYVTPLFVSRAPNRKMSGQGHMETVKSAKRLDEGISVLRVPLTQLKLKDLEKMVNREREPKLYDALKAQLETHKDDPAKAFAEPFYKYDKAGSRTQQVKAVRIEQVQKTGVWVRNHNGIADNATMVRVDVFEKGGKYYLVPIYSWQVAKGILPDRAVVAFKDEEDWTVMDDSFEFRFVLYANDLIKAELKKETFFGYFSGLDRSTGNISLRSHDLDKTKGKDGVYRIGIKTALSFQKHQIDELGKEIRPCRLKKRPPVR

SEQ ID NO: 1088 - protein, 408 aa, Neisseria lactamica
MNDTRYVNRFLCQFVADHILLTGKGKRRVFASNGQITNLLRGFWGLRKVRTENDRHHALDAVVVACSTVAMQQKITRFVRYKEMNAFDGKTIDKETGEVLHQKAHFPQPWEFFAQEVMIRVFGKPDGKPEFEEADTPEKLRTLLAEKLSSRPEAVHEYVTPLFVSRAPNRKMSGQGHMETVKSAKRLDEGISVLRVPLTQLKLKGLEKMVNREREPKLYDALKAQLETHKDDPAKAFAEPFYKYDKAGSRTQQVKAVRIEQVQKTGVWVRNHNGIADNATMVRVDVFEKGGKYYLVPIYSWQVAKGILPDRAVVAFKDEEDWTVMDDSFEFRFVLYANDLIKLTAKKNEFLGYFVSLNRATGAIDIRTHDTDSTKGKNGIFQSVGVKTALSFQKTKSTNSAKKSDHAV

SEQ ID NO: 1089 - protein, 1082 aa, Neisseria meningitidis
MAAFKPNPINYILGLDIGIASVGWAMVEIDEDENPICLIDLGVRVFERAEVPKTGDSLAAARRLARSVRRLTRRRAHRLLRARRLLKREGVLQAADFDENGLIKSLPNTPWQLRAAALDRKLTPLEWSAVLLHLIKHRGYLSQRKNEGETADKELGALLKGVADNAHALQTGDFRTPAELALNKFEKESGHIRNQRGDYSHTFSRKDLQAELILLFEKQKEFGNPHVSGGLKEGIETLLMTQRPALSGDAVQKMLGHCTFEPAEPKAAKNTYTAERFIWLTKLNNLRILEQGSERPLTDTERATLMDEPYRKSKLTYAQARKLLGLEDTAFFKGLRYGKDNAEASTLMEMKAYHAISRALEKEGLKDKKSPLNLSPELQDEIGTAFSLFKTDEDITGRLKDRVQPEILEALLKHISFDKFVQISLKALRRIVPLMEQGKRYDEACAEIYGDHYGKKNTEEKIYLPPIPADEIRNPVVLRALSQARKVINGVVRRYGSPARIHIETAREVGKSFKDRKEIEKRQEENRKDREKAAAKFREYFPNFVGEPKSKDILKLRLYEQQHGKCLYSGKEINLGRLNEKGYVEIDHALPFSRTWDDSFNNKVLVLGSENQNKGNQTPYEYFNGKDNSREWQEFKARVETSRFPRSKKQRILLQKFDEDGFKERNLNDTRYVNRFLCQFVADRMRLTGKGKKRVFASNGQITNLLRGFWGLRKVRAENDRHHALDAVVVACSTVAMQQKITRFVRYKEMNAFDGKTIDKETGEVLHQKTHFPQPWEFFAQEVMIRVFGKPDGKPEFEEADTPEKLRTLLAEKLSSRPEAVHEYVTPLFVSRAPNRKMSGQGHMETVKSAKRLDEGVSVLRVPLTQLKLKDLEKMVNREREPKLYEALKARLEAHKDDPAKAFAEPFYKYDKAGNRTQQVKAVRVEQVQKTGVWVRNHNGIADNATMVRVDVFEKGDKYYLVPIYSWQVAKGILPDRAVVQGKDEEDWQLIDDSFNFKFSLHPNDLVEVITKKARMFGYFASCHRGTGNINIRIHDLDHKIGKNGILEGIGVKTALSFQKYQIDELGKEIRPCRLKKRPPVR

SEQ ID NO: 1090 - protein, 976 aa, Neisseria meningitidis
MAAFKPNPINYILGLDIGIASVGWAMVEIDEDENPICLIDLGVRVFERAEVPKTGDSLAAARRLARSVRRLTRRRAHRLLRARRLLKREGVLQAADFDENGLIKSLPNTPWQLRAAALDRKLTPLEWSAVLLHLIKHRGYLSQRKNEGETADKELGALLKGVADNAHALQTGDFRTPAELALNKFEKESGHIRNQRGDYSHTFSRKDLQAELILLFEKQKEFGNPHVSGGLKEGIETLLMTQRPALSGDAVQKMLGHCTFEPAEPKAAKNTYTAERFIWLTKLNNLRILEQGSERPLTDTERATLMDEPYRKSKLTYAQARKLLGLEDTAFFKGLRYGKDNAEASTLMEMKAYHAISRALEKEGLKDKKSPLNLSPELQDEIGTAFSLFKTDEDITGRLKDRIQPEILEALLKHISFDKFVQISLKALRRIVPLMEQGKRYDEACAEIYGDHYGKKNTEEKIYLPPIPADEIRNPVVLRALSQARKVINGVVRRYGSPARIHIETAREVGKSFKDRKEIEKRQEENRKDREKAAAKFREYFPNFVGEPKSKDILKLRLYEQQHGKCLYSGKEINLGRLNEKGYVEIDHALPFSRTWDDSFNNKVLVLGSENQNKGNQTPYEYFNGKDNSREWQEFKARVETSRFPRSKKQRILLQKFDEDGFKERNLNDTRYVNRFLCQFVADRMRLTGKGKKRVFASNGQITNLLRGFWGLRKVRAENDRHHALDAVVVACSTVAMQQKITRFVRYKEMNAFDGKTIDKETGEVLHQKTHFPQPWEFFAQEVMIRVFGKPDGKPEFEEADTPEKLRTLLAEKLSSRPEAVHEYVTPLFVSRAPNRKMSGQGHMETVKSAKRLDEGVSVLRVPLTQLKLKDLEKMVNREREPKLYEALKARLEAHKDDPAKAFAEPFYKYDKAGNRTQQVKAVRVEQVQKTGVWVRNHNGIADNATMVRVDVFEKGDKYYLVPIYSWQVAKGIFAG

SEQ ID NO: 1091 - protein, 1081 aa, Neisseria meningitidis
MAAFKPNPINYILGLDIGIASVGWAMVEIDEDENPICLIDLGVRVFERAEVPKTGDSLAAARRLARSVRRLTRRRAHRLLRARRLLKREGVLQAADFDENGLIKSLPNTPWQLRSAALDRKLTPLEWSAVLLHLIKHRGYLSQRKNEGETADKELGALLKGVADNAHALQTGDFRTPAELALNKFEKESGHIRNRRGDYSHTFSRKDLQAELDLLFEKQKEFGNPHISDDLKEGIETLLMTQRPALSGDAVQKMLGHCTFEPTEPKAAKNTYTAERFVWLTKLNNLRILEQGSERPLTDTERATLMDEPYRKSKLTYAQARKLLELDDTAFFKGLRYGKDNAEASTLMEMKAYHAISRALEKEGLKDKKSPLNLSPELQDEIGTAFSLFKTDEDITGRLKDRVQPEILEVLLKHISFDKFVQISLKALRRIVPLMEQGKRYDEACAEIYGDHDGKKNTEEKIYLPPIPADEIRNPVVLRALSQARKVINAVVRRYGSPARIHIETAREVGKSFKDRKEIEKRQEENRKDREKAAAKFREYFPNFVGEPKSKDILKLRLYEQQHGKCLYSGKEINLGRLNEKGYVEIDHALPFSRTWDDSFNNKVLVLGSENQNKGNQTPYEYFNGKDNSREWQEFKARVETSRFPRSKKQRILLQKFDEEGFKERNLNDTRYVNRFLCQFVADHMLLTGKGKRRVFASNGQITNLLRGFWGLRKVRAENNRHHALDAVVVACSTVAMQQKITRFVRYKEMNAFDGKTIDKETGEVLHQKTHFPQPWEFFAQEVMIRVFGKPDGKPEFEEADTPEKLRTLLAEKLSSRPEAVHEYVTPLFVSRAPNRKMSGQGHMETVKSAKRLDEGVSVLRVPLTQLKLKDLEKMVNREREPKLYEALKARLEAHKDDPAKAFAEPFYKYDKAGNRTQQVKAVRVEQVQKTGVWVRNHNGIADNATMVRVDVFEKAGKYYLVPIYSWQVAKGILPDRAVVAYADEEGWTVIDESFRFKFVLYSNDLIKVQLKKDSFLGYFSGLDRATGAISLREHDLEKSKGKDGMHRIGVKTALSFQKYQIDEMGKEIRLCRLKKRPPVR

SEQ ID NO: 1092 - protein, 1081 aa, Neisseria meningitidis
MAAFKPNPINYILGLDIGIASVGWAMVEIDEDENPICLIDLGVRVFERAEVPKTGDSLAAARRLARSVRRLTRRRAHRLLRARRLLKREGVLQAADFDENGLIKSLPNTPWQLRSAALDRKLTPLEWSAVLLHLIKHRGYLSQRKNEGETADKELGALLKGVANNAHALQTGDFRTPAELALNKFEKESGHIRNQRGDYSHTFSRKDLQAELILLFEKQKEFGNPHVSGGLKEGIETLLMTQRPALSGDAVQKMLGHCTFEPAEPKAAKNTYTAERFIWLTKLNNLRILEQGSERPLTDTERATLMDEPYRKSKLTYAQARKLLGLEDTAFFKGLRYGKDNAEASTLMEMKAYHAISRALEKEGLKDKKSPLNLSPELQDEIGTAFSLFKTDEDITGRLKDRIQPEILEALLKHISFDKFVQISLKALRRIVPLMEQGKRYDEACAEIYGDHYGKKNTEEKIYLPPIPADEIRNPVVLRALSQARKVINGVVRRYGSPARIHIETAREVGKSFKDRKEIEKRQEENRKDREKAAAKFREYFPNFVGEPKSKDILKLRLYEQQHGKCLYSGKEINLGRLNEKGYVEIDHALPFSRTWDDSFNNKVLVLGSENQNKGNQTPYEYFNGKDNSREWQEFKARVETSRFPRSKKQRILLQKFDEDGFKERNLNDTRYVNRFLCQFVADRMRLTGKGKKRVFASNGQITNLLRGFWGLRKVRAENDRHHALDAVVVACSTVAMQQKITRFVRYKEMNAFDGKTIDKETGEVLHQKTHFPQPWEFFAQEVMIRVFGKPDGKPEFEEADTPEKLRTLLAEKLSSRPEAVHEYVTPLFVSRAPNRKMSGQGHMETVKSAKRLDEGVSVLRVPLTQLKLKDLEKMVNREREPKLYEALKARLEAHKDDPAKAFAEPFYKYDKAGNRTQQVKAVRVEQVQKTGVWVRNHNGIADNATMVRVDVFEKAGKYYLVPIYSWQVAKGILPDRAVVAYADEEGWTVIDESFRFKFVLYSNDLIKVQLKKDSFLGYFSGLDRATGAISLREHDLEKSKGKDGMHRIGVKTALSFQKYQIDEMGKEIRLCRLKKRPPVR

SEQ ID NO: 1093 - protein, 1082 aa, Neisseria meningitidis
MAAFKPNPINYILGLDIGIASVGWAMVEIDEDENPICLIDLGVRVFERAEVPKTGDSLAMARRLARSVRRLTRRRAHRLLRARRLLKREGVLQAADFDENGLIKSLPNTPWQLRAAALDRKLTPLEWSAVLLHLIKHRGYLSQRKNEGETADKELGALLKGVADNAHALQTGDFRTPAELALNKFEKESGHIRNQRGDYSHTFSRKDLQAELILLFEKQKEFGNPHVSGGLKEGIETLLMTQRPALSGDAVQKMLGHCTFEPAEPKAAKNTYTAERFIWLTKLNNLRILEQGSERPLTDTERATLMDEPYRKSKLTYAQARKLLGLEDTAFFKGLRYGKDNAEASTLMEMKAYHAISRALEKEGLKDKKSPLNLSPELQDEIGTAFSLFKTDEDITGRLKDRIQPEILEALLKHISFDKFVQISLKALRRIVPLMEQGKRYDEACAEIYGDHYGKKNTEEKIYLPPIPADEIRNPVVLRALSQARKVINGVVRRYGSPARIHIETAREVGKSFKDRKEIEKRQEENRKDREKAAAKFREYFPNFVGEPKSKDILKLRLYEQQHGKCLYSGKEINLGRLNEKGYVEIDHALPFSRTWDDSFNNKVLVLGSENQNKGNQTPYEYFNGKDNSREWQEFKARVETSRFPRSKKQRILLQKFDEDGFKERNLNDTRYVNRFLCQFVADRMRLTGKGKKRVFASNGQITNLLRGFWGLRKVRAENDRHHALDAVVVACSTVAMQQKITRFVRYKEMNAFDGKTIDKETGEVLHQKTHFPQPWEFFAQEVMIRVFGKPDGKPEFEEADTPEKLRTLLAEKLSSRPEAVHEYVTPLFVSRAPNRKMSGQGHMETVKSAKRLDEGVSVLRVPLTQLKLKDLEKMVNREREPKLYEALKARLEAHKDDPAKAFAEPFYKYDKAGNRTQQVKAVRVEQVQKTGVWVRNHNGIADNATMVRVDVFEKGDKYYLVPIYSWQVAKGILPDRAVVQGKDEEDWQLIDDSFNFKFSLHPNDLVEVITKKARMFGYFASCHRGTGNINIRIHDLDHKIGKNGILEGIGVKTALSFQKYQIDELGEEIRPCRLKKRPPVR

SEQ ID NO: 1094 - protein, 1082 aa, Neisseria meningitidis
MAAFKPNPINYILGLDIGIASVGWAMVEIDEDENPICLIDLGVRVFERAEVPKTGDSLAMARRLARSVRRLTRRRAHRLLRARRLLKREGVLQAADFDENGLIKSLPNTPWQLRAAALDRKLTPLEWSAVLLHLIKHRGYLSQRKNEGETADKELGALLKGVADNAHALQTGDFRTPAELALNKFEKESGHIRNQRGDYSHTFSRKDLQAELILLFEKQKEFGNPHVSGGLKEGIETLLMTQRPALSSDAVQKMLGHCTFEPAEPKAAKNTYTAERFIWLTKLNNLRILEQGSERPLTDTERATLMDEPYRKSKLTYAQARKLLGLEDTAFFKGLRYGKDNAEASTLMEMKAYHAISRALEKEGLKDKKSPLNLSPELQDEIGTAFSLFKTDEDITGRLKDRIQPEILEALLKHISFDKFVQISLKALRRIVPLMEQGKRYDEACAEIYGDHYGKKNTEEKIYLPPIPADEIRNPVVLRALSQARKVINGVVRRYGSPARIHIETAREVGKSFKDRKEIEKRQEENRKDREKAAAKFREYFPNFVGEPKSKDILKLRLYEQQHGKCLYSGKEINLGRLNEKGYVEIDHALPFSRTWDDSFNNKVLVLGSENQNKGNQTPYEYFNGKDNSREWQEFKARVETSRFPRSKKQRILLQKFDEDGFKERNLNDTRYVNRFLCQFVADRMRLTGKGKKRVFASNGQITNLLRGFWGLRKVRAENDRHHALDAVVVACSTVAMQQKITRFVRYKEMNAFDGKTIDKETGEVLHQKTHFPQPWEFFAQEVMIRVFGKPDGKPEFEEADTPEKLRTLLAEKLSSRPEAVHEYVTPLFVSRAPNRKMSGQGHMETVKSAKRLDEGVSVLRVPLTQLKLKDLEKMVNREREPKLYEALKARLEAHKDDPAKAFAEPFYKYDKAGNRTQQVKAVRVEQVQKTGVWVRNHNGIADNATMVRVDVFEKGDKYYLVPIYSWQVAKGILPDRAVVQGKDEEDWQLIDDSFNFKFSLHPNDLVEVITKKARMFGYFASCHRGTGNINIRIHDLDHKIGKNGILEGIGVKTALSFQKYQIDELGKEIRPCRLKKRPPVR

SEQ ID NO: 1095 - protein, 1082 aa, Neisseria meningitidis
MAAFKPNPINYILGLDIGIASVGWAMVEIDEDENPICLIDLGVRVFERAEVPKTGDSLAMARRLARSVRRLTRRRAHRLLRARRLLKREGVLQAADFDENGLIKSLPNTPWQLRAAALDRKLTPLEWSAVLLHLIKHRGYLSQRKNEGETADKELGALLKGVADNAHALQTGDFRTPAELALNKFEKESGHIRNQRGDYSHTFSRKDLQAELILLFEKQKEFGNPHVSGGLKEGIETLLMTQRPALSSDAVQKMLGHCTFEPAEPKAAKNTYTAERFIWLTKLNNLRILEQGSERPLTDTERATLMDEPYRKSKLTYAQARKLLGLEDTAFFKGLRYGKDNAEASTLMEMKAYHAISRALEKEGLKDKKSPLNLSPELQDEIGTAFSLFKTDEDITGRLKDRIQPEILEALLKHISFDKFVQISLKALRRIVPLMEQGKRYDEACAEIYGDHYGKKNTEEKIYLPPIPADEIRNPVVLRALSQARKVINGVVRRYGSPARIHIETAREVGKSFKDRKEIEKRQEENRKDREKAAAKFREYFPNFVGEPKSKDILKLRLYEQQHGKCLYSGKEINLGRLNEKGYVEIDHALPFSRTWDDSFNNKVLVLGSENQNKGNQTPYEYFNGKDNSREWQEFKARVETSRFPRSKKQRILLQKFDEDGFKERNLNDTRYVNRFLYQFVADRMRLTGKGKKRVFASNGQITNLLRGFWGLRKVRAENDRHHALDAVVVACSTVAMQQKITRFVRYKEMNAFDGKTIDKETGEVLHQKTHFPQPWEFFAQEVMIRVFGKPDGKPEFEEADTPEKLRTLLAEKLSSRPEAVHEYVTPLFVSRAPNRKMSGQGHMETVKSAKRLDEGVSVLRVPLTQLKLKDLEKMVNREREPKLYEALKARLEAHKDDPAKAFAEPFYKYDKAGNRTQQVKAVRVEQVQKTGVWVRNHNGIADNATMVRVDVFEKGDKYYLVPIYSWQVAKGILPDRAVVQGKDEEDWQLIDDSFNFKFSLHPNDLVEVITKKARMFGYFASCHRGTGNINIRIHDLDHKIGKNGILEGIGVKTALSFQKYQIDELGKEIRPCRLKKRPPVR

SEQ ID NO: 1096 - protein, 1081 aa, Neisseria meningitidis
MAAFKPNPINYILGLDIGIASVGWAMVEIDEDENPICLIDLGVRVFERAEVPKTGDSLAMARRLARSVRRLTRRRAHRLLRARRLLKREGVLQAADFDENGLIKSLPNTPWQLRAAALDRKLTPLEWSAVLLHLIKHRGYLSQRKNEGETADKELGALLKGVADNAHALQTGDFRTPAKLALNKFEKESGHIRNQRGDYSHTFSRKDLQAELNLLFEKQKEFGNPHISDGLKEGIETLLMTQRPALSGDAVQKMLGHCTFEPTEPKAAKNTYTAERFVWLTKLNNLRILEQGSEQPLTDTQRAKLMDEPYRKSKLTYAQARKLLGLEDTAFFKGLRYGKDNAEASTLMEMKAYHAISRALEKEGLKDKKSPLNLSPELQDEIGTAFSLFKTDEDITGRLKDRVQPEILEALLKHISFDKFVQISLKALRRIVPLMEQGKRYNEACAEIYGDHYGKKNTEEKIYLPPIPADEIRNPVVLRALSQARKVINGVVRRYGSPARIHIETAREVGKSFKDRKEIEKRQEENRKDREKAAAKFQEYFPNFVGEPKSKDILKLRLYEQQHGKCLYSGKEINLGRLNEKGYVEIDHALPFSRTWDDSFNNKVLVLGSENQNKGNQTPYEYFNGKDNSREWQEFKARVETSRFPRSKKQRILLQKFDEDGFKERNLNDTRYVNRFLCQFVADRMRLTGKGKKRVFASNGQITNLLRGFWGLRKVRAENDRHHALDAVVVACSTVAMQQKITRFVRYKEMNAFDGKTIDKETGEVLHQKTHFPQPWEFFAQEVMIRVFGKPDGKPEFEEADTPEKLRTLLAEKLSSRPEAVHEYVTPLFVSRAPNRKMSGQGHMETVKSAKRLDEGVSVLRVPLTQLKLKDLEKMVNREREPKLYEALKARLEAHKDDPAKAFAEPFYKYDKAGNRTQQVKAVRVEQVQKTGVWVRNHNGIADNATMVRVDVFEKGDKYYLVPIYSWQVAKGILPDRAVVAYADEEDWTVIDESFRFKFVLYSNDLIKVQLKKDSFLGYFSGLDRATGAISLREHDLEKSKGKDGMHRIGVKTALSFQKYQIDEMGKEIRPCRLKKRPPVR

SEQ ID NO: 1097 - protein, 1081 aa, Neisseria meningitidis
MAAFKPNPINYILGLDIGIASVGWAMVEIDEEENPIRLIDLGVRVFERAEVPKTGDSLAMARRLARSVRRLTRRRAHRLLRARRLLKREGVLQAADFDENGLIKSLPNTPWQLRAAALDRKLTPLEWSAVLLHLIKHRGYLSQRKNEGETADKELGALLKGVADNAHALQTGDFRTPAELALNKFEKECGHIRNQRGDYSHTFSRKDLQAELNLLFEKQKEFGNPHVSGGLKEGIETLLMTQRPALSGDAVQKMLGHCTFEPAEPKAAKNTYTAERFIWLTKLNNLRILEQGSERPLTDTERATLMDEPYRKSKLTYAQARKLLSLEDTAFFKGLRYGKDNAEASTLMEMKAYHTISRALEKEGLKDKKSPLNLSPELQDEIGTAFSLFKTDEDITGRLKDRIQPEILEALLKHISFDKFVQISLKALRRIVPLMEQGKRYDEACAEIYGDHYGKKNTEEKIYLPPIPADEIRNPVVLRALSQARKVINGVVRRYGSPARIHIETAREVGKSFKDRKEIEKRQEENRKDREKAAAKFREYFPNFVGEPKSKDILKLRLYEQQHGKCLYSGKEINLGRLNEKGYVEIDHALPFSRTWDDSFNNKVLVLGSENQNKGNQTPYEYFNGKDNSREWQEFKARVETSRFPRSKKQRILLQKFDEDGFKERNLNDTRYVNRFLCQFVADRMRLTGKGKKRVFASNGQITNLLRGFWGLRKVRAENDRHHALDAVVVACSTVAMQQKITRFVRYKEMNAFDGKTIDKETGEVLHQKTHFPQPWEFFAQEVMIRVFGKPDGKPEFEEADTPEKLRTLLAEKLSSRPEAVHEYVTPLFVSRAPNRKMSGQGHMETVKSAKRLDEGVSVLRVPLTQLKLKDLEKMVNREREPKLYEALKARLEAHKDDPAKAFAEPFYKYDKAGNRTQQVKAVRVEQVQKTGVWVRNHNGIADNATMVRVDVFEKGDKYYLVPIYSWQVAKGILPDRAVVAYADEEDWTVIDESFRFKFVLYSNDLIKVQLKKDSFLGYFSGLDRATGAISLREHDLEKSKGKDGMHRIGVKTALSFQKYQIDEMGKEIRPCRLKKRPPVR

SEQ ID NO: 1098 - protein, 1082 aa, Neisseria meningitidis
MAAFKPNPINYILGLDIGIASVGWAMVEIDEEENPIRLIDLGVRVFERAEVPKTGDSLAMARRLARSVRRLTRRRAHRLLRARRLLKREGVLQAADFDENGLIKSLPNTPWQLRAAALDRKLTPLEWSAVLLHLIKHRGYLSQRKNEGETADKELGALLKGVADNAHALQTGDFRTPAELALNKFEKECGHIRNQRGDYSHTFSRKDLQAELNLLFEKQKEFGNPHVSGGLKEGIETLLMTQRPALSGDAVQKMLGHCTFEPAEPKAAKNTYTAERFIWLTKLNNLRILEQGSERPLTDTERATLMDEPYRKSKLTYAQARKLLGLEDTAFFKGLRYGKDNAEASTLMEMKAYHAISRALEKEGLKDKKSPLNLSPELQDEIGTAFSLFKTDEDITGRLKDRIQPEILEALLKHISFDKFVQISLKALRRIVPLMEQGKRYDEACAEIYGDHYGKKNTEEKIYLPPIPADEIRNPVVLRALSQARKVINGVVRRYGSPARIHIETAREVGKSFKDRKEIEKRQEENRKDREKAAAKFREYFPNFVGEPKSKDILKLRLYEQQHGKCLYSGKEINLVRLNEKGYVEIDHALPFSRTWDDSFNNKVLVLGSENQNKGNQTPYEYFNGKDNSREWQEFKARVETSRFPRSKKQRILLQKFDEEGFKERNLNDTRYVNRFLCQFVADHILLTGKGKRRVFASNGQITNLLRGFWGLRKVRAENDRHHALDAVVVACSTVAMQQKITRFVRYKEMNAFDGKTIDKETGEVLHQKTHFPQPWEFFAQEVMIRVFGKPDGKPEFEEADTPEKLRTLLAEKLSSRPEAVHEYVTPLFVSRAPNRKMSGQGHMETVKSAKRLDEGVSVLRVPLTQLKLKDLEKMVNREREPKLYEALKARLEAHKDDPAKAFAEPFYKYDKAGNRTQQVKAVRVEQVQKTGVWVRNHNGIADNATMVRVDVFEKGGKYYLVPIYSWQVAKGILPDRAVVQGKDEEDWQLIDDSFNFKFSLHPNDLVEVITKKARMFGYFASCHRGTGNINIRIHDLDHKIGKNGILEGIGVKTALSFQKYQIDELGKEIRPCRLKKRPPVR

SEQ ID NO: 1099 - protein, 1081 aa, Neisseria meningitidis
MAAFKPNPINYILGLDIGIASVGWAMVEIDEEENPIRLIDLGVRVFERAEVPKTGDSLAMARRLARSVRRLTRRRAHRLLRARRLLKREGVLQAADFDENGLIKSLPNTPWQLRAAALDRKLTPLEWSAVLLHLIKHRGYLSQRKNEGETADKELGALLKGVADNAHALQTGDFRTPAELALNKFEKESGHIRNQRGDYSHTFSRKDLQAELILLFEKQKEFGNPHVSGGLKEGIETLLMTQRPALSGDAVQKMLGHCTFEPAEPKAAKNTYTAERFIWLTKLNNLRILEQGSERPLTDTERATLMDEPYRKSKLTYAQARKLLGLEDTAFFKGLRYGKDNAEASTLMEMKAYHAISRALEKEGLKDKKSPLNLSPELQDEIGTAFSLFKTDEDITGRLKDRVQPEILEALLKHISFDKFVQISLKALRRIVPLMEQGKRYDEACAEIYGDHYGKKNTEEEIYLPPITADEIRNPVVLRALSQARKVINAVVRRYGSPARIHIETAREVGKSFKDRKEIEKRQEENRKDREKAAAKFREYFPNFVGEPKSKDILKLRLYEQQHGKCLYSGKEINLVRLNEKGYVEIDHALPFSRTWDDSFNNKVLVLGSENQNKGNQTPYEYFNGKENSREWQEFKARVETSRFPRSKKQRILLQKFDEDGFKERNLNDTRYVNRFLCQFVADRMRLTGKGKKRVFASNGQITNLLRGFWGLHKVRAENDRHHALDAVVVACSTIAMQQKITRFVRYKEMNAFDGKTIDKETGEVLHQKAHFPQPWEFFAQEVMIRVFGKPDGKPEFEEADTPEKLRTLLAEKLSSRPEAVHEYVTPLFVSRAPNRKMSGQGHMETVKSAKRLDEGISVLRVPLTQLKLKDLEKMVNRAREPKLYEALKARLEAHKDDPAKAFAEPFYKYDKAGNRTQQVKAVRVEQVQKTGVWVRNHNGIADNATMVRVDVFEKAGKYYLVPIYSWQVAKGILPDRAVVAYADEEDWTVIDESFRFKFVLYSNDLIKVQLKKDSFLGYFSGLDRATGAISLREHDLEKSKGKDGMHRIGVKTALSFQKYQIDEMGKEIRPCRLKKRPPVR

SEQ ID NO: 1100 - protein, 1082 aa, Neisseria meningitidis
MAAFKPNPINYILGLDIGIASVGWAMVEIDEEENPIRLIDLGVRVFERAEVPKTGDSLAMARRLARSVRRLTRRRAHRLLRARRLLKREGVLQAADFDENGLIKSLPNTPWQLRAAALDRKLTPLEWSAVLLHLIKHRGYLSQRKNEGETADKELGALLKGVANNAHALQTGDFRTPAELALNKFEKESGHIRNQRGDYSHTFSRKDLQAELILLFEKQKEFGNPHVSGGLKEGIETLLMTQRPALSGDAVQKMLGHCTFEPAEPKAAKNTYTAERFIWLTKLNNLRILEQGSERPLTDTERATLMDEPYRKSKLTYAQARKLLGLEDTAFFKGLRYGKDNAEASTLMEMKAYHAISRALEKEGLKDKKSPLNLSSELQDEIGTAFSLFKTDEDITGRLKDRVQPEILEALLKHISFDKFVQISLKALRRIVPLMEQGKRYDEACAEIYGDHYGKKNTEEKIYLPPIPADKIRNPVVLRALSQARKVINGVVRRYGSPARIHIETAREVGKSFKDRKEIEKRQEENRKDREKAAAKFREYFPNFVGEPKSKDILKLRLYEQQHGKCLYSGKEINLVRLNEKGYVEIDHALPFSRTWDDSFNNKVLVLGSENQNKGNQTPYEYFNGKDNSREWQEFKARVETSRFPRSKKQRILLQKFDEDGFKECNLNDTRYVNRFLCQFVADHILLTGKGKRRVFASNGQITNLLRGFWGLRKVRAENDRHHALDAVVVACSTVAMQQKITRFVRYKEMNAFDGKTIDKETGKVLHQKTHFPQPWEFFAQEVMIRVFGKPDGKPEFEEADTPEKLRTLLAEKLSSRPEAVHEYVTPLFVSRAPNRKMSGAHKDTLRSAKRFVKHNEKISVKRVWLTEIKLADLENMVNYKNGREIELYEALKARLEAYGGNAKQAFDPKDNPFYKKGGQLVKAVRVEKTQESGVLLNKKNAYTIADNGDMVRVDVFCKVDKKGKNQYFIVPIYAWQVAENILPDIDCKGYRIDDSYTFCFSLHKYDLIAFQKDEKSKVEFAYYINCDSSNGRFYLAWHDKGSKEQQFRISTQNLVLIQKYQVNELGKEIRPCRLKKRPPVR

SEQ ID NO: 1101 - protein, 1082 aa, Neisseria meningitidis
MAAFKPNPINYILGLDIGIASVGWAMVEIDEEENPIRLIDLGVRVFERAEVPKTGDSLAMARRLARSVRRLTRRRAHRLLRARRLLKREGVLQAADFDENGLIKSLPNTPWQLRAAALDRKLTPLEWSAVLLHLIKHRGYLSQRKNEGETADKELGALLKGVANNAHALQTGDFRTPAELALNKFEKESGHIRNQRGDYSHTFSRKDLQAELILLFEKQKEFGNPHVSGGLKEGIETLLMTQRPALSGDAVQKMLGHCTFEPAEPKAAKNTYTAERFIWLTKLNNLRILEQGSERPLTDTERATLMDEPYRKSKLTYAQARKLLGLEDTAFFKGLRYGKDNAEASTLMEMKAYHAISRALEKEGLKDKKSPLNLSSELQDEIGTAFSLFKTDEDITGRLKDRVQPEILEALLKHISFDKFVQISLKALRRIVPLMEQGKRYDEACAEIYGDHYGKKNTEEKIYLPPIPADEIRNPVVLRALSQARKVINGVVRRYGSPARIHIETAREVGKSFKDRKEIEKRQEENRKDREKAAAKFREYFPNFVGEPKSKDILKLRLYEQQHGKCLYSGKEINLVRLNEKGYVEIDHALPFSRTWDDSFNNKVLVLGSENQNKGNQTPYEYFNGKDNSREWQEFKARVETSRFPRSKKQRILLQKFDEDGFKECNLNDTRYVNRFLCQFVADHILLTGKGKRRVFASNGQITNLLRGFWGLRKVRAENDRHHALDAVVVACSTVAMQQKITRFVRYKEMNAFDGKTIDKETGKVLHQKTHFPQPWEFFAQEVMIRVFGKPDGKPEFEEADTPEKLRTLLAEKLSSRPEAVHEYVTPLFVSRAPNRKMSGAHKDTLRSAKRFVKHNEKISVKRVWLTEIKLADLENMVNYKNGREIELYEALKARLEAYGGNAKQAFDPKDNPFYKKGGQLVKAVRVEKTQESGVLLNKKNAYTIADNGDMVRVDVFCKVDKKGKNQYFIVPIYAWQVAENILPDIDCKGYRIDDSYTFCFSLHKYDLIAFQKDEKSKVEFAYYINCDSSNGRFYLAWHDKGSKEQQFRISTQNLVLIQKYQVNELGKEIRPCRLKKRPPVR

SEQ ID NO: 1102 - protein, 1082 aa, Neisseria meningitidis
MAAFKPNPINYILGLDIGIASVGWAMVEIDEEENPIRLIDLGVRVFERAEVPKTGDSLAMARRLARSVRRLTRRRAHRLLRTRRLLKREGVLQAANFDENGLIKSLPNTLWQLRAAALDRKLTPLEWSAVLLHLIKHRGYLSQRKNEGETADKELGALLKGVAGNAHALQTGDFRTPAELALNKFEKESGHIRNQRGDYSHTFSRKDLQAELNLLFEKQKEFGNPHISDGLKEGIETLLMTQRPALSGDAVQKMLGHCTFEPTEPKAAKNTYTTERFIWLTKLNNLRILEQGSERPLTDTERATLMDEPYRKSKLTYAQARKLLELDDIAFFKGLRYGKDNAEASTLMEMKAYHAISRALEKEGLKDKKSPLNLSPELQDEIGTAFSLFKTDEDITGRLKDRIQPEILEALLKHINFDKFVQISLKALRRIVPLMEQGKRYDEACAEIYGDHYGKKNTEEKIDLPPIPADEIHNPVVLRALSQARKVINGVVRRYGSPARIHIETAREVGKSFKDRKEIEKRQEENRKDREKAAAKFREYFPNFVGEPKSKDILKLRLYEQQHGKCLYSGKEINLGRLNEKGYVEIDHALPFSRTWDDSFNNKVLVLGSENQNKGNQTPYEYFNGKDNSREWQEFKARVETSRFPRSKKQRILLQKFDEDGFKERNLNDTRYVNRFLCQFVADRMRLTGKGKKRVFASNGQITNLLRGFWGLRKVRAENDRHHALDAVVVACSTVAMQQKITRFVRYKEMNAFDGKTIDKETGEVLHQKTHFPQPWEFFAQEVMIRVFGKPDGKPEFEEADTPEKLRTLLTEKLSSRPEAVHEYVTPLFVSRAPNRKMSGQGHMETVKSAKRLDEGISVLRVPLTQLKLKDLEKMVNREREPKLYEALKARLEAHKDDPAKAFAEPFYKYDKAGNRTQQVKAMRVEQVQKTGVWVRNHNGIADNATMVRVDVFEKGDKYYLVPIYSWQVAKGILPDRAVVQGKDEEDWQLIDDSFNFKFSLHPNDLVEVITKKARMFGYFASCHRGTGNINIRIHDLDHKIGKNGILEGIGVKTALSFQKYQIDELGKEIRPCRLKKRPPVR

SEQ ID NO: 1103 - protein, 1082 aa, Neisseria meningitidis
MAAFKPNPINYILGLDIGIASVGWAMVEIDEEENPIRLIDLSVRVFERAEVPKTGDSLAMARRLARSVRRLTRRRAHRLLRARRLLKREGVLQAADFDENGLIKSLPNTPWQLRAAALDRKLTPLEWSAVLLHLIKHRGYLSQRKNEGETADKELGALLKGVADNAHALQTGDFRTPAELALNKFEKESGHIRNQRGDYSHTFSRKDLQAELILLFEKQKEFGNPHVSGGLKEGIETLLMTQRPALSGDAVQKMLGHCTFEPAEPKAAKNTYTAERFVWLTKLNNLRILEQGSERPLTDTERATLMDEPYRKSKLTYAQARKLLGLEDTAFFKGLRYGKDNAEASTLMEMKAYHAISRALEKEGLKDKKSPLRLSPELQDEIGTAFSLFKTDEDITGRLKDRVQPEILEALLKHISFDKFVQISLKALRRIVPLMEQGKRYDEACAEIYGDHYGKKNAEEKIYLPPIPADEIRNPVVLRALSQARKVINGVVRRYGSPARIHIETAREVGKSFKDRKEIEKRQEENRKDREKAAAKFREYFPNFVGEPKSKDILKLRLYEQQHGKCLYSGKEINLGRLNEKGYVEIDHALPFSRTWDDSFNNKVLVLGSENQNKGNQTPYEYFNGKDNSREWQEFKARVETSRFPRSKKQRILLQKFDEDGFKERNLNDTRYVNRFLCQFVADRMRLTGKGKKRVFASNGQITNLLRGFWGLRKVRAENDRHHALDAVVVACSTVAMQQKITRFVRYKEMNAFDGKTIDKETGEVLHQKTHFPQPWEFFAQEVMIRVFGKPDGKPEFEEADTPEKLRTLLAEKLSSRPEAVHEYVTPLFVSRAPNRKMSGQGHMETVKSAKRLDEGVSVLRVPLTQLKLKDLEKMVNREREPKLYEALKARLEAHKDDPAKAFAEPFYKYDKAGNRTQQVKAVRVEQVQKTGVWVRNHNGIADNATMVRVDVFEKGDKYYLVPIYSWQVAKGILPDRAVVQGKDEEDWQLIDDSFNFKFSLHPNDLVEVITKKARMFGYFASCHRGTGNINIRIHDLDHKIGKNGILEGIGVKTALSFQKYQIDELGKEIRPCRLKKRPPVR

SEQ ID NO: 1104 - protein, 1082 aa, Neisseria meningitidis
MAAFKPNSINYILGLDIGIASVGWAMVEIDEEENPIRLIDLGVRVFERAEVPKTGDSLAMARRLARSVRRLTRRRAHRLLRTRRLLKREGVLQAANFDENGLIKSLPNTPWQLRAAALDRKLTPLEWSAVLLHLIKHRGYLSQRKNEGETADKELGALLKGVAGNAHALQTGDFRTPAELALNKFEKESGHIRNQRSDYSHTFSRKDLQAELILLFEKQKEFGNPHVSGGLKEGIETLLMTQRPALSGDAVQKMLGHCTFEPAEPKAAKNTYTAERFIWLTKLNNLRILEQGSERPLTDTERATLMDEPYRKSKLTYAQARKLLGLEDTAFFKGLRYGKDNAEASTLMEMKAYHAISRALEKEGLKDKKSPLNLSPELQDEIGTAFSLFKTDEDITGRLKDRIQPEILEALLKHISFDKFVQISLKALRRIVPLMEQGKRYDEACAEIYGDHYGKKNTEEKIYLPPIPADEIRNPVVLRALSQARKVINGVVRRYGSPARIHIETAREVGKSFKDRKEIEKRQEENRKDREKAAAKFREYFPNFVGEPKSKDILKLRLYEQQHGKCLYSGKEINLGRLNEKGYVEIDHALPFSRTWDDSFNNKVLVLGSENQNKGNQTPYEYFNGKDNSREWQEFKARVETSRFPRSKKQRILLQKFDEDGFKERNLNDTRYVNRFLCQFVADRMRLTGKGKKRVFASNGQITNLLRGFWGLRKVRAENDRHHALDAVVVACSTVAMQQKITRFVRYKEMNAFDGKTIDKETGEVLHQKTHFPQPWEFFAQEVMIRVFGKPDGKPEFEEADTLEKLRTLLAEKLSSRPEAVHEYVTPLFVSRAPNRKMSGQGHMETVKSAKRLDEGVSVLRVPLTQLKLKDLEKMVNREREPKLYEALKARLEAHKDDPAKAFAEPFYKYDKAGNRTQQVKAVRVEQVQKTGVWVRNHNGIADNATMVRVDVFEKGDKYYLVPIYSWQVAKGILPDRAVVQGKDEEDWQLIDDSFNFKFSLHPNDLVEVITKKARMFGYFASCHRGTGNINIRIHDLDHKIGKNGILEGIGVKTALSFQKYQIDELGKEIRPCRLKKRPPVR

SEQ ID NO: 1105 - protein, 67 aa, Neisseria meningitidis
MFGYFASCHRGTGNINIRIHDLDHKIGKNGILEGIGVKTALSFQKYQIDELGKEIRPCRLKKRPPVR

SEQ ID NO: 1106 - protein, 220 aa, Neisseria mucosa
MRHIFSDGLKEGIETLLMTQRPALSGDAVQKMLGHCTFEPTEPKAAKNTYTAERFIWLTKLNNLRILEQGSERPLTNTERATLMDEPYRKSKLTYAQARKLLGLKDTAFFKGLRYGKDNAEASTLMEMKAYHAISRALEKEGLKDKKSPLNLSPELQDEIGTAFSLFKTDEDITGRLKTELTPASNKTLSRPFTVKSASNGSTSAPWLPSTKWFLHFKPA

SEQ ID NO: 1107 - protein, 392 aa, Neisseria sp.
MAPFTLKPLNYILGLDIGIASVGWAVVETDSDVLPYRLIDVGVRTFDRAEVPKTGESPAAARRLARSVRRMIRRRAHRMLRARRLLKREGMLQAADFDAHGLVENLPVNPWQLRVDALSRKLMPLEWAAVLLHMVKHRGYLSQRKNERNSSDKELGALLSGVAANSEALQGGDFRTPAELAVNKFEKESGHIRNQRGDYSHTFNRKDVQAELVLLFEKQKEYGNPYISDGLLTGVEDLLMTQRAALSGDAVQKMLGRCTFEPEEYKAAKNTYSAERFVWLTKLNNLRILDQGSERPLTDSERAKLMDEPYKKTKLTYAQVRRLLELDDTAFFKGLRYSKDNAESATLMEMKAYHSISGALEKAGLKNKKIAAGLIARIAGRNRRGVFAIQNR

SEQ ID NO: 1108 - protein, 701 aa, Neisseria sp.
MQDEIGEAFSLFKTDEDIRGRLKGKLPDEQLDALLEYVSFDKFVQLSLKALRKILPLMEQGKRYDEACAEIYGDHYGIKDDKQAQFLPPVSADEIRNPVVLRALSQARKVVNAVVRRYGSPARVHIETAREVGKSFLDRKKIEKRQEENRKDRERSIAKFREYFPNFVGEPKAKDILKMRLYEQQQGQCLYSGKAIDLRRLNEKGYVEIDHALPFSRTWDDSFNNKVLVLAGENQNKRNQTPFEWLGGDEKRWREFTARVEHCRFPRSKKQRILMQKLDEKDFKERNLNDTRYVNRFLCNFIAQNMLLTGEDKNRVFASNGQITNLLRGMWGLKKVRESNDRHHALDAVVVACSTVAMQQKITNYVRQKEMNVFDGEMVDKTTGEVSRLHFPQPWDFFRQEVMMRVFGKPDTPSENNEEADTPEKLRALLADKLSSRPEAVHEAVTPLFVSRAPSRKMSGQGHMETIKSAKRLSEGKSVLRVPLTQLTPKLLENMVNREREPQLYEDLLGRLNAHGGDPAKAFAAPFFKRDKAGNPTQQVKAVRVEDVQKSGVIVREGNGVADNATMVRVDVFEKGGKYYLMPIYTWQAAKGILPNKAVIAHTDEANWQEMDTSFTFKFALYPNDLVLASLKKETYFGYFAGLDRSTGNISLRVHDLEKSKGKDGVYRIGVKTALSFQKYQVDELGKTIRPCRLKKRPPVR

SEQ ID NO: 1109 - protein, 1089 aa, Neisseria sp.
MTAFKPNPLNYILGLDIGIASVGWAMVEIDDKENPVRLIDLGVRVFERAEMPKTGDSLAAARRLARSVRRLTRRRAHRLLRARRLLKHEGVLKPEDFDENGLVKPLPYIPKQPRNTPWQLRAAALDRKLTPLEWAAVLLHLVKHRGYLSQRKNEGETDDKELGALLKGVADNTHALQAGNFRTPAELALNKFEKESGHIRNQRGDYSHTFSRKDLQAELVLLFEKQKEFGNPYVSDDLKNGIENLLMTQRPALSGDAIQKMLGHCTFEPAEPKAAKNTYTAERFIWLTKLNNLRILNQGNERPLTDAERTTLMDEPYKKSKLTYAQARKLLDLDDTAFFKGLRYGKDNAESATLMEMKAYHAISRALEKEGLKDKKSPLSLSPELQDEIGTAFSLFKTDEEITGRLKGCLQPEILDALLKHISFDKFVQISLKALRRIVPLMEQGKRYDEACAEIYGDHHGRRNSEETLYLPPIPADEIRNPVVLRALSQARKVINGVGRRYGSPARIHIETAREVGKSFKDRKEIEKRQEENRKDREKAAAEFQEYFPNFVGEPKSKDILKLRLYRQQNCKCLYSGKEINLGRLNEKGYVEIDHALPFSRTWDDSFNNKVLVLGSENQNKGNRTPYEYLNGKDNSREWQEFKARVETSRFPHSKKQRILLQKFDEEGFKERNLNDTRYVNRFLCKFVADHMQLTGKGKRRVFASNGQITNLLRGFWGLRKVRAENDRHHALDAVVVACSTVAMQQRITRFVRYKEMNAFDGKTVDKETGEVLHQKTHFPQPWEFFAQEVMIRVFGKPDGKPELEEADTPEKLRALLAEKLSSRPEAVHEYVAPLFVSRAPNRKMSGQGHMETIKSPKRLDEGISVVRVPLTQLKLKDLEKMVNREREPKLYEALKARLEAHKDDPAKAFAEPFYKQDKAGNRTQQVKAVRIEQVQKTGVWVRNQNGIADNATMVRVDVFEKGGKYYLVPIYSWQVAKGILPDKAIIAFKDEEEWQLIDDSFNFKFPLHPNDLVEVITKKARIFGYFASCHRGTGNINIRIHDLDNKVGKNGILEGIGVKTALSFQKYQIDELGKEIRPCRLKKRPPVR

SEQ ID NO: 1110 - protein, 1097 aa, Neisseria wadsworthii
MKKQPQRYILGLDLGIASVGWALILVDGAENPVGLLDCGVRTFERAEVPKTGDSLALARRQARSVRRLIRRRAHRLLRLRRLLKREGILSAADFNSDGLPNLPIDAWQLRVAGLERKLTNQEWAAVLLHLVKHRGYLSQRKSETQTENKELGRLLAGVAENSKLLSESSEQYRTPAELAVKLFAEQSGHLRNKGGEYTHTFNRLDLQKELHLLFERQYALGNPFASAELQSKVDELLMTQRSALQGEAVLKMLGKCTFEPSEYKAAKNTYSAERFIWLTKLNNLRILYNGEERALDEGDRKKLLDEPYKKAKLTYKQVRSILNLPESAVFKGLRYGKDSDGLKAENGTLMEMKAYHKIRTILDKAGLKGEWENRIRNPEILDKIGTAFSLYKTDEDIQAALADLRLPENVLDALLAGLNFDKFIQLSLKALRNILPLMERGIRYDEACKEVYGDHRALAESKNQVLLPPIPADEIRNPVVLRTLTQARKVINAIIRRYGSPQRVHIETARELGKSKQERDKIDRKNKENQNDRNRLASDIRKHFNFEPTPKDILKLRLYEQQHGKCLYSDLREEKGECLYTGNVIELHRLFEDGYVEIDHALPLSRTWDNSLNNKVLVLKSSNQNKGNKTPYEWLDGANNSRRWREFQARVQGCHFPYVKKQRIQTAKLDSKAEQGFLERNLNDTRYISKFMCQFITANLRLAETSNALMEEVAGENPYWKERKRQRVFAPSGSIIALLRGLWGLKKVREDNDRHHALDAIVVACSTVSMQQKITKAMQRRETLETVDSETGEVKTRIPQPWDFFRQEVMIRVFSDSPREELAEKLNSRPEALHDFVSPLFVSRAPNRKMTGQGHLETVKSAKRLSENISVVRKPLTALKLKDIENIVGYPDREPALYQALRERLLAHKDDPVKAFADKPFYKPAKDGGQGSLVKAVRIIENTKHGLKIRNGITDTNGDMVRTDVYQKTDKKGKRQYFIVPVYAWQVEKNELPTVDCKGYEIDDNYEFCFSLYKYDLIEIQNPNDINQELRAYYINCDSSDGRFWLAYHDKSAKEQQFRISTQNQPIIKKYQVDTLGKEIRLCKAEKRTALNGKKKK

SEQ ID NO: 1111 - protein, 1426 aa, Niabella soli
MPRKNILGLDLGTTSIGFAKIIEDDDYQCSSVELIGVRVNPLTTDEQTNFEKGKPVSVNADRTLKRGMRRNLDRYQLRRDYLIEILRTHHIITADTKLAEDGKNTTHTTYALRALAATAEIPLEAFVRVLLAINKKRGYKSSRKAKNEDEGQLIDGMAIARRLYEESLTPGQFSYQLLKEGKKYLPDFYRSDLNTELNKVWNFQKQFYPEILTDEFKRHLEGKGQRATAVAFWGQHGFSMAENKGSREEKKLHAYKWRSEAAHKQLTKEEVAFVITEINNDLNKSSGYLGAISDRSKELFFNKQTVGQYLHQQLKENPHTRLKGQVFYRQDYLDEFETIWEMQAKFYSALTLELKEEVRDVVIFYQRKLKSQMGLISLCEFESKEIEIEKNGEKAKKRIGLRVAPKSSPLFQEFKIWQVLNNLEFRNKKTKEVFVPEMAAKQQLFDELNIKGNLLASEAIKILGYKTKDWEANYHTLEGNRTNKSLYDAWLKILELEGYDENLLKLSGSDDIDVSKIEKPALEIRQMVLAVFEVLGISGAILDFDAEADGKAFEQQPAYQLWHLLYSAEDDGKKYSQEDIFTYGHDNIGLKKKLCEKFGFRPEHTKILVNVVFSDDYGNLSSKAMRRIYPFIKELTYDKACAEAGYRHSAASLTKEEIAARPLQNRLDLLKKNELRSPVVEKILNQMVNVVNTLVDDENQNRKARGLSEDFHFDEIRIELARELKKNAKERAEMTTNINTAKQSHEKIIRILQTEFGVPNPSRNDIVRYKLYEELKNNGYKDLYTNTYISRDILFSKQIDVDHIIPQMSLFDDSFSNKTVVFRKDNQDKGNKTAYDYILGKYGEQALEEYISRITSLFELGKKNKEEGIGKAKFQKLQKRLVDIGDGFIERDLRESQYIAKKANNMLYAICRSVVSTSGEITARLREDWDLVNVMQEINLPKFRALGLTEMVEKKDGAQKERITDWTKRNDHRHHAMDALAIAFTRHSHIQYLNHLNARKDEANKWHPVVSKIEEKETVLIYDDLGNRKRKFKAPMPNFREVVKEHLENVLISHKAKNKVVTKNKNKIKTVRGEKVKTELTPRGQLHKETIYGRYRYYESKEEKIGPKFDAEMIGMVTNPQYKKLLLERLAANGNDPKKAFWGKNALNKNPLYVDEARQELLPEKILLRWLNDDYSIRKDVTPENLKDIKTIEKILDKGVKKILLKRLADFGNDPKKAFSDLDKNPIWQNEAKRIAIKRVTISGIKNAAPLHHKKDHLGNDILDEKGKQIPSSFVSTGNNHHVAIYRDAEGNLQERVVSLFDAVQLVNGGEPVIDKEYNKGIGWQFLFTMKQNEMFVFPDEKTGFNPREVDLLSSGNRKLISPNLFRVQKLASKNYFFRHHLETSVEEKKELKNIAYKPQLGLNALSNIVKVRINHIGEIVSVGEY

SEQ ID NO: 1112 - protein, 79 aa, Nitritalea halalkaliphila
MPLRLPERVYKMISSTGAECHFLPVNVSSLIKGYDAKSKLGEFGSQNKQEVTSDSFIRVKERCYKLEINRLGIPLNRLK

SEQ ID NO: 1113 - protein, 1498 aa, Odoribacter laneus
METTLGIDLGTNSIGLALVDQEEHQILYSGVRIFPEGINKDTIGLGEKEESRNATRRAKRQMRRQYFRKKLRKAKLLELLIAYDMCPLKPEDVRRWKNWDKQQKSTVRQFPDTPAFREWLKQNPYELRKQAVTEDVTRPELGRILYQMIQRRGFLSSRKGKEEGKIFTGKDRMVGIDETRKNLQKQTLGAYLYDIAPKNGEKYRFRTERVRARYTLRDMYIREFEIIWQRQAGHLGLAHEQATRKKNIFLEGSATNVRNSKLITHLQAKYGRGHVLIEDTRITVTFQLPLKEVLGGKIEIEEEQLKFKSNESVLFWQRPLRSQKSLLSKCVFEGRNFYDPVHQKWIIAGPTPAPLSHPEFEEFRAYQFINNIIYGKNEHLTAIQREAVFELMCTESKDFNFEKIPKHLKLFEKFNFDDTTKVPACTTISQLRKLFPHPVWEEKREEIWHCFYFYDDNTLLFEKLQKDYALQTNDLEKIKKIRLSESYGNVSLKAIRRINPYLKKGYAYSTAVLLGGIRNSFGKRFEYFKEYEPEIEKAVCRILKEKNAEGEVIRKIKDYLVHNRFGFAKNDRAFQKLYHHSQAITTQAQKERLPETGNLRNPIVQQGLNELRRTVNKLLATCREKYGPSFKFDHIHVEMGRELRSSKTEREKQSRQIRENEKKNEAAKVKLAEYGLKAYRDNIQKYLLYKEIEEKGGTVCCPYTGKTLNISHTLGSDNSVQIEHIIPYSISLDDSLANKTLCDATFNREKGELTPYDFYQKDPSPEKWGASSWEEIEDRAFRLLPYAKAQRFIRRKPQESNEFISRQLNDTRYISKKAVEYLSAICSDVKAFPGQLTAELRHLWGLNNILQSAPDITFPLPVSATENHREYYVITNEQNEVIRLFPKQGETPRTEKGELLLTGEVERKVFRCKGMQEFQTDVSDGKYWRRIKLSSSVTWSPLFAPKPISADGQIVLKGRIEKGVFVCNQLKQKLKTGLPDGSYWISLPVISQTFKEGESVNNSKLTSQQVQLFGRVREGIFRCHNYQCPASGADGNFWCTLDTDTAQPAFTPIKNAPPGVGGGQIILTGDVDDKGIFHADDDLHYELPASLPKGKYYGIFTVESCDPTLIPIELSAPKTSKGENLIEGNIWVDEHTGEVRFDPKKNREDQRHHAIDAIVIALSSQSLFQRLSTYNARRENKKRGLDSTEHFPSPWPGFAQDVRQSVVPLLVSYKQNPKTLCKISKTLYKDGKKIHSCGNAVRGQLHKETVYGQRTAPGATEKSYHIRKDIRELKTSKHIGKVVDITIRQMLLKHLQENYHIDITQEFNIPSNAFFKEGVYRIFLPNKHGEPVPIKKIRMKEELGNAERLKDNINQYVNPRNNHHVMIYQDADGNLKEEIVSFWSVIERQNQGQPIYQLPREGRNIVSILQINDTFLIGLKEEEPEVYRNDLSTLSKHLYRVQKLSGMYYTFRHHLASTLNNEREEFRIQSLEAWKRANPVKVQIDEIGRITFLNGPLC

SEQ ID NO: 1114 - protein, 1389 aa, Oenococcus kitaharae; identical to SEQ ID NO: 236

SEQ ID NO: 1115 - protein, 1535 aa, Ornithobacterium rhinotracheale
MNTILGLDLGTNSIGWALIKVLNDKTRLPLEIIDLGVVVIPTDQRTLDKFSKGESISKTAERTKQKGVRKLYERKKLRRERLHRVLNILGFLPEHYSKKIDFKKHLGQFFGNSQPKISYVENDHGKHEFIFMDSYREMLKEFSKHNIKNVPYDWTIYYLRKKALSQKISKEELAWVILNFNKKRGYYQFRDDNADENKENKIEKYYALKVTNVKKEDAQNYTITLENGWIYKNKSKISLLDWVGSTKEFISTEKFDNKGNIIKKKNGEDDRTLKLVDSEKDWIAIKKSTEDRIENYGKTVGTYLYEHLLKDPNQKLNGELINIIDRKFYKNELKQILEKQKEFHPELLNEDLFQKSIIELYPKNSTRQKELKNKDLCYLLIDDVIYYQRDLKKKNSTINKCSFESREYYLNGEKQIQKINCIAKSKPLYQEFRTLQFIKNLKVYEIIDGLEKDITSKLLPDFETKEHFFEWLNDKEKIDQLQLLSYKCFDLHDNVKNDLIAKGIKRPTEKAIRTELLEKYRWNYSKDNDRNFLLNETRFKILKYLKKVDKKLTLTNEQIESLWLLLYSAKDERELKNGLQKFSEKNKLPKKFSDIFISFPPFKKEYGAYSEKALKKLLSLVRFGKYWSFNKIDNNIQNKIMNILNGEVDDSISDRVREKTILLQDKNDFQDLPLWLASYVAYNRFSEVSEIKYWDSPDKIEFLKQHSIGNPIVEKIINETLKLIKDIWVIHGKSCKNFFSEIHIELSREIKSSSKKRAQITNNNTKNQKLNNLIKSLLIEMASDTKYENVTPYSPSQQEILKIYDEGIYSKEENSEKIKEINKIRNNNKISKSDITKYKLWLEQGYISPYTGKIIPLTKLFTAKYQKEHIIPQTKFFDDSFNNKVICEAEVNKLKDNSLAMNFIKAKGGKAVKLSDGETVTILNQEEYKQLVRTSFKKNSIKLRNLLLEEIPDTFTKRQLNDTKYISKLVLSLLSNIVREKGELESTAKRIVSTNGQITSILRNDWGLNNIWNKLITPRFERLNNINKNKIYGNWENKKGKNVFQINYLNDNLSTLNTKRIDHRHHALDALIVACTTRNHINFLNNQYAKSRNQRHDLRAKLKRRETITTEGSKKQVFKDFIKPWESFTQDALKKLETTIVNFKVNKRIINKTINWYKKWEKQKDGTYKKIQKKQTKGDAWAIRKPLHIDTIYGIVCKKLPLKSALENYKNIIDENLKHKIKELKEVNKFDNNQIINFFKECNFIFEDNNIQKVEVYDFKDNRDKTILSSSRQLIDESFTPKKIGKVLDPTIRNILLKHLNSTKYNNKFDSDGNPIKPEKLAFSPEGLKDLNKNIKHLNNNKEHQPIKRVKLFETLGNKIKVGYTQQKNKKFAETATGTNLFLGIYSDNNKRDFKTIPLILAIQREKEGLNPCPDTDEKGNQLLFSLSPNELVFVPNNEERKNPNLVDFENLSKDQIDRIYKFVSCTGSEAYFVPSRTAKPIIENENGTNNKSQRIIEFNEKTSIKNEKNEPVLIKTICWKIEVNRLGKIIKVIK

SEQ ID NO: 1116 - protein, 103 aa, Parabacteroides merdae
MIVYRLFYRFLFKATKLVNFVIHKELKRQIARTGKIKFHSGGCGCQSGNYKMQNFEKGKSITTNADRTLKRSMRRNLYRCKLRRDVLIELLKKVGFIPEKQWK

SEQ ID NO: 1117 - protein, 82 aa, Parabacteroides merdae
MSIWKLQYPPLDLKIYNKFLVYSRVNPLTVDEMQNFEKGKSITTNADRTLKRSMRRNLQRYKLRRDVLIELLKKVGFMSEKQ

SEQ ID NO: 1118 - protein, 84 aa, Parabacteroides merdae
MSIWKLQYPPLDLKIYNKFLVYSRVNPLTVDEMQNFEKGKSITTNADRTLKRSMRRNLYRCKLRRDVLIELLKKVGFIPEKQWK

SEQ ID NO: 1119 - protein, 398 aa, Pasteurella bettyae
MLANENQNKGNLTPYEWLDGKNNSKRWQDFVARVQTCCFSHRKKQHILSHKLDEKSFIERNLNDTRYVARFLCNFIADNMLLTGKGKRKVFASNGQITALLRGRWGLQKVRDDNDRHHALDAVVIACSTVAMQQKITRFVKYEEGNVFSGERIDRETGEIIPLYFPTPWKFFKENVEIRIFSENPKLELENRLPDYPQYNHEFVQPLFVSRMPTRKMTGQGHMETIKSAKRLDEGISVLKVPLTQLKLADLENMVNRERELALYEALKERLELFGNDPAKAFIEPFYKKGGALVKAVRVKKVQKSGVLVRDGNGVADNALMVRVDVFTKGGKYFLVPIYTWQVAKGILPNKAVTANIDEIDWLEMDESYQFIFTMYPNDLVKVKLKKEEFFGYYGGLD

SEQ ID NO: 1120 - protein, 610 aa, Pasteurella bettyae
MNMLKPLNYILGLDLGIGSVGWAVVEIDEQGNPLRLIDVGVRTFERAEVAKTGESLALARRLARSSRRLVKRRAARIKKAKRLLKAENILLSVDEILPNDVWQLRVKGLDHKLERQEWAAVLLHLLKRRGYLSQRKNESKSENKELGALLSGVVTNHQILQTDEYRTPAEIAVHKFQAEDGHIRNQRGDYTHTFSRLDLLAEMELLFQRQTELGNLHTSSKLLENLTALLMWQKPALAGEAILKMLGKCTFEPTEYKAAKNSYSAERFVWLTKLNNLRILEQGAERALTDSERFVLLDQPYEKAKLTYAQVRTLLKLSDEAIFKGVRYQGEDKKTVESKTTLMEMKAYHQIRKALDGADLKDEWNTLKNDSALLDEIGTAFSLYKTDDDISHYLGGKLSEKVLNVLLENLNFDKFIQLSLKALQKILPLMLQGQRYDEAVSAVYGDHYGKKSAESCRLLPAIPANEIHNPVVLRTLTQARKVINAVVRLYGSPARIHIETGRKVGKSYQDRKKLEKQQEENREQRESAVKKFKEYFPNFVGEPKGKDILKLRLYELQQSKCLYSGKSFDPNRLLEKGYVEVDHALPFSRTWDDSFNNKVCLPMKTRIKAI

SEQ ID NO: 1121 - protein, 199 aa, Pasteurella multocida
MACATPSMQQKITRFIRFKEVHPYKIENRYEMVDQESGEIISPHFPEPWAYFRQEVNIRVFDNHPDTVLKEMLPDRPQANHQFVQPLFVSRAPTRKMSGQGHMETIKSAKRLAEGISVLRIPLTQLKPNLLENMVNKEREPALYAGLKARLAEFNQDPAKAFTTPFYKQGGQQVKAIRVEQVQKSGVLVRENNGVADNA

SEQ ID NO: 1122 - protein, 63 aa, Pasteurella multocida
MQTTNLSYILGLDLGIASVGWAVVEINENEDPIGLIDVGVRIFERAEVPKTGESLALSRRLAR

SEQ ID NO: 1123 - protein, 1058 aa, Pasteurella multocida
MQTTNLSYILGLDLGIASVGWAVVEINENEDPIGLIDVGVRIFERAEVPKTGESLALSRRLARSTRRLIRRRAHRLLLAKRFLKREGILSTTDLEKGLPNQAWELRVAGLERRLSAIEWGAVLLHLIKHRGYLSKRKNESQTNNKELGALLSGVAQNHQLLQSDDYRTPAELALKKFAKEEGHIRNQRGAYTHTFNRLDLLAELNLLFAQQHQFGNPHCKEHIQQYMTELLMWQKPALSGEAILKMLGKCTHEKNEFKAAKHTYSAERFVWLTKLNNLRILEDGAERALNEEERQLLINHPYEKSKLTYAQVRKLLGLSEQAIFKHLRYSKESAESATFMELKAWHAIRKALENQGLKDTWQDLAKKPDLLDEIGTAFSLYKTDEDIQQYLEGKLPDSVINALLVSLNFDKFIELSLKSLRKILPLMEQGKRYDQACHEIYGHHYGEKNQQISQLLPVIPTQEIRNPVVLRTLSQARKVINAIIRQYGSPARVHIETGRELGKSFKERREIQKQQEDNRTKRESAVQKFKELFSDFSSEPKSKDILKFRLYEQQHGKCLYSGKEINIHRLNEKGYVEIDHALPFSRTWDDSFNNKVLVLASENQNKGNQTPYEWLQGKINSERWKNFVALVLGSQCSAAKKQRLLTQVIDDNKFIDRNLNDTRYIARFLSNYIQENLLLVGKNKKNVFTPNGQITALLRSRWGLIKVRENNDRHHALDAIVVACATPSMQQKITRFIRFKEVHPYKIENRYEMVDQESGEIISPHFPEPWAYFRQEVNIRVFDNHPDTVLKEMLPDRPQANHQFVQPLFVSRAPTRKMSGQGHMETIKSAKRLAEGISVLRIPLTQLKPNLLENMVNKEREPALYVGLKARLAEFNQDPAKAFATPFYKQGGQQVKAIRVELVQKSGVLVRQGNGVADNAPGSIVRTDVFIKNNKFFLVPIYTWQVAKGILPNKAIVAHKNEDEWEEMDEGAKFKFSIFPNDLIELRTKTECFLGYYIGPDRHNGSISLREHDSEISKGNAGVYRVGVKLALSLEKYHIDELGKNRRICRPHQRRPVR

SEQ ID NO: 1124 - protein, 1056 aa, Pasteurella multocida
MQTTNLSYILGLDLGIASVGWAVVEINENEDPIGLIDVGVRIFERAEVPKTGESLALSRRLARSTRRLIRRRARRLLLAKRFLKREGILSTTDLEKGLPNQAWELRVAGLERRLSAIEWGAVLLHLIKHRGYLSKRKNESQTNNKELGALLSGVAQNHQLLQSDDYRTPAELALKKFAKEEGHIRNQRGAYTHTFNRLDLLAELNLLFAQQHQFGNPHCKEHIQQYMTELLMWQKPALSGEAILKMLGKCTHEKNEFKAAKHTYSAERFVWLTKLNNLRILEDGAERALNEEERQLLINHPYEKSKLTYAQVRKLLGLSEQAIFKHLRYSKENAESATFMELKAWHAIRKALENQGLKDTWQDLAKKPDLLDEIGTAFSLYKTDEDIQQYLTNKVPNSVINALLVFLNFDKFIELALKSLRKILPLMEQGKRYDQACREIYGHHYGEANQKTSQLLPAIPAQEIRNPVVLRTLSQARKVINAIIRQYGSPARVHIETGRELGKSFKERREIQKQQEDNRTKRESAVQKFKELFSDFSSEPKSKDILKFRLYEQQHGKCLYSGKEINIHRLNEKGYVEIDHALPFSRTWDDSFNNKVLVLASENQNKGNQTPYEWLQGKINSERWKNFVALVLGSQCSAAKKQRLLTQVIDDNKFIDRNLNDTRYIARFLSNYIQENLLLVGKNKKNVFTPNGQITALLRSRWGLIKIRENNDRHHALDAIVVACATPSMQQKITRFIRFKEVHPYKIENRYEMVDQESGEIISPHFPEPWAYFRQEVNIRVFDNHPDTVLKEMLPDRPQANHQFVQPLFVSRAPTRKMSGQGHMETIKSAKRLAEGISVLRIPLTQLKPNLLENMVNKEREPALYAGLKARLAEFNQDPAKAFTTPFYKQGGQQVKAIRVEQVQKSGVLVRENNGVADNASIVRTDVFIKNNKFFLVPIYTWQVAKGILPNKAIVAHKNEDEWEEMDEGAKFKFSLFPNDLVELKTKKEYFFGYYIGLDRATGNISLKEHDGEISKGKDGVYRVGVKLALSFEKYQVDELGKNRQICRPQQRQPVR

SEQ ID NO: 1125 - protein, 134 aa, Pasteurella multocida
MVNKEREPALYAGLKARLAEFNQDPAKAFTTPFYKQGGQQVKAIRVEQVQKSGVLVRENNGVADNASIVRTDVFIKNNKFFLVPIYTWQVAKGILPNKAIVAHKNEDEWEEMDEGAKFKFSLFPNDLVELKTKK

SEQ ID NO: 1126 - protein, 53 aa, Pasteurella multocida
YSKENAESATFMELKAWHAIRKALENQGLKDTWQDLAKKPDLLDEIGTAFSLL

SEQ ID NO: 1127 - protein, 1366 aa, Pediococcus acidilactici
MGDRKYNLGLDIGTSSIGFAAVDENNQPIRVKGKTAIGVRLFEEGKTAADRRGFRTTRRRLSRRRWRINLLNEIFDAHLAEVDPTFLARLKESNRSNLDPKKSFQGSLLFPERKDYQFYEEYPTIYHLRKALMEEDRKFDIREIYLAVHHIIKYRGNFLNGTPMRSFKVENIELDTLFDQLNQLYAEIVPDNELAFDLAQVADVKDVLSSTTIYKMDKKKQLVKMMLLPASNKALQSENKKIVTQFVNAILNYKFKLDVLLQVETDADWSLKLNDEGADDKLEEFTGDLDENRLEIIDLLQRLHNWFSLNEITKDGNSLSAAMVEKYENHHHHLGLLKKVIENHPDAKKAKALKETYTAYVGKTDDKTQNQDDFYKAVEKNLDDSPDAKEIKRLIQLDQFMPKQRTGQNGAIPHQLHQQELDQIIEKQSKYYPFLAEPNPNVKRRKDAPYKLDELIAFKIPYYVGPLVTPEEQAQNKENVFAWMKRKAAGPITPWNFDEKVDRMESANRFIRRMTTKDTYLFGEDVLPAESMIYQKFVVLNELNNLKINGRHLSLKDKQDVYNDLFKQQKTVSIKALQNYYVTKKKAATAPTVGGLADPKKFLSSLSTYIDFKNMFGERVNDPQFQEDLEQIVEWSTIFEDRGIFKAKLQALGWLSEKQIQQLVAKRYKGWGRLSKKLLTGLKNAEGYSILDEMWRSTENFMQIQTRPEFAALIQQANEKQFEGNDPNNVWENIESILGDAYTSPQNKKAIRQVVKVVQDIEKAVGNPPEKIAIEFTREAAANPQRTQSRLRTLEKLYESAEEVVDAGLTAELAEFKENKHVLSDKYYLYFTQLGRDVYTGDTISLDKLNDYDVDHILPQSFIKDDSLDNRVLTIRAVNNGKSDNVPAKMFGKKMGSFWRYLLDNGMISKRKYNNLITDPDNISKYAQKGFINRQLVETSQVIKLTANILNGIYDKDTEIIEVPAKMNSQMRKMFDLVKVREVNDYHHAFDAYLTIFIGKYLYKCYPKLRPYFVYGKFKKFGDNEDIEVGDGRFNFLNRIERLKNVTDPETGEILWSNVAPNETIKQIKKVYNYKFMLVSRETTTRRAELFNQTVYPKNYRGKLIPIKEDRPTDLYGGYSGNTDAYLAIVALEDKKKGKYFKVVGIPTRAAAKLEKLKQQDSQQYLQALHKVIAPQFTKSTKKGIKKTEFEIVLDKVHYRQLVQDGPVKMMLGSSTYKYNAKQLVLSEKALQVIADDRKFDETQKDDNLIAVYDEILSIVNQSFDLYDINGFRKKLNDNRDQFIDLPAETKYEGRKVVAHGKREMILEILKGLHANAAFGNLKPIGFSTAFGQLQVPNGIILSKNAILIHQSPSGLFERKIKLSDL

SEQ ID NO: 1128 - protein, 1229 aa, Pediococcus acidilactici; identical to SEQ ID NO: 125

SEQ ID NO: 1129 - protein, 270 aa, Pediococcus lolii
LFNQTIYSAKASKTMIPIKNDRPTKLYGGYSGNEDAYMSIIRLSDKKKTYKVVGISMRDASKLKAYENNAHEEYLKKLKEVIEQQFLDSGKKTKADFEIVIPKVNYHQRMQDGTKQFRIGSSKYVHNTKQLVLSEKTLKAIRNNKQYNGDAEKDLINAFDEILTIVNDSFSIFDIRSFRKKLNESRDKFVSLPVEDTKEKSKVIKGKRETLKQILIALHANGTSQDIPQLGLKSFGKMVKTGGLTLSENTALIHQSPSGLFEHKIKLSDL

SEQ ID NO: 1130 - protein, 1016 aa, Pediococcus lolii
MNGIFDAHLAEVDPTFLARLKESNRSNLDPKKSFQGSLLFPERKDYQFYKEYPTIYHLRKALMEKDRKFDIREIYLAVHHIIKYRGNFLNGTPMRSFKVENIELDTLFDRLNQLYEEIIPDNELAFDLEQVADVKEVLSSTTIYKMDKKKQLVKMMLLPASNKALQSENKKIVTQFVNAILNYKFKLDVLLQVETDADWSLKLNDEGADDKLEEFTGDLDENRLEIIDLLQRLHNWFSLNEITKDGNSLSAAMVEKYKDHRHHLELLKKVIEDHSDAKKAKALKETYTAYVGKTDDKTQNKDDFYKAVEKNLDDSPEAKEIKRLIQLDQFMPKQRTGQNGAIPHQLHQQELDQIIEKQSKYYPFLAEPNPNVKRRKDAPYKLDELIAFKIPYYVGPLVTPEEQAQNKENVFAWMKRKAAGPITPWNFDEKVDRMESANRFIRRMTTKDTYLFGEDVLPAESMIYEKFVVLNELNNLKINGRHLSLKDKQDIYNDLFKQQKTVSIKALQNYYVTKKKAATAPTVGGLADPKKFLSSLSTYIDFKNMFGERVNDPQFQEDLEQIVEWSTIFEDRGIFKAKLQALGWLSEKQIQQLVAKRYKGWGRLSKKLLTGLKNAEGYSILDEMWHSTENFMQIQTRPEFAALIQQANEKQFEGNDPDNVWENIENILGDAYTSPQNKKAIRQVVKVVQDIEKAVGNPPEKIAIEFTREAAANPQRTQSRLRTLEKLYESAEEVVDAGLTAELAEFKENKHVLSDKYYLYFTQLGRDVYTGDTISLDRLNDYDVDHILPQSFIKDDSLDNRVLTIRAVNNGKSDNVPAKMFGKKMGSFWRYLLDNGMISKRKYNNLITDPDNISKYAQKGFINRQLVETSQVIKLTANILNGIYDKDTEIIEVPAKMNSQMRKMFDLVKVREVNDYHHAFDAYLTIFIGNYLYKCYPKLRPYFVYDNFKKFGNKEDIGHKRFNFLGKIERDKKVVAPETGEILWSNVAPNETIKQIKKVYDYKFMLTSHETYTKHG

SEQ ID NO: 1131 - protein, 1333 aa, Planococcus antarcticus
MKNYTIGLDIGVASVGWVCIDENYKILNYNNRHAFGVHEFESAESAAGRRLKRGMRRRYNRRKKRLQLLQSLFDSYITDSGFFSKTDSQHFWKNNNEFENRSLTEVLSSLRISSRKYPTIYHLRSDLIESNKKMDLRLVYLALHNLVKYRGHFLQEGNWSEAASAEGMDDQLLELVTRYAELENLSPLDLSESQWKAAETLLLNRNLTKTDQSKELTAMFGKEYEPFCKLVAGLGVSLHQLFPSSEQALAYKETKTKVQLSNENVEEVMELLLEEESALLEAVQPFYQQVVLYELLKGETYVAKAKVSAFKQYQKDMASLKNLLDKTFGEKVYRSYFISDKNSQREYQKSHKVEVLCKLDQFNKEAKFAETFYKDLKKLLEDKSKTSIGTTEKDEMLRIIKAIDSNQFLQKQKGIQNAAIPHQNSLYEAEKILRNQQAHYPFITTEWIEKVKQILAFRIPYYIGPLVKDTTQSPFSWVERKGDAPITPWNFDEQIDKAASAEAFISRMRKTCTYLKGQEVLPKSSLTYERFEVLNELNGIQLRTTGAESDFRHRLSYEMKCWIIDNVFKQYKTVSTKRLLQELKKSPYADELYDEHTGEIKEVFGTQKENAFATSLSGYISMKSILGAVVDDNPAMTEELIYWIAVFEDREILHLKIQEKYPSITDVQRQKLALVKLPGWGRFSRLLIDGLPLDEQGQSVLDHMEQYSSVFMEVLKNKGFGLEKKIQKMNQHQVDGTKKIRYEDIEELAGSPALKRGIWRSVKIVEELVSIFGEPANIVLEVAREDGEKKRTKSRKDQWEELTKTTLKNDPDLKSFIGEIKSQGDQRFNEQRFWLYVTQQGKCLYTGKALDIQNLSMYEVDHILPQNFVKDDSLDNLALVMPEANQRKNQVGQNKMPLEIIEANQQYAMRTLWERLHELKLISSGKLGRLKKPSFDEVDKDKFIARQLVETRQIIKHVRDLLDERFSKSDIHLVKAGIVSKFRRFSEIPKIRDYNNKHHAMDALFAAALIQSILGKYGKNFLAFDLSKKDRQKQWRSVKGSNKEFFLFKNFGNLRLQSPVTGEEVSGVEYMKHVYFELPWQTTKMTQTGDGMFYKESIFSPKVKQAKYVSPKTEKFVHDEVKNHSICLVEFTFMKKEKEVQETKFIDLKVIEHHQFLKEPESQLAKFLAEKETNSPIIHARIIRTIPKYQKIWIEHFPYYFISTRELHNARQFEISYELMEKVKQLSERSSVEELKIVFGLLIDQMNDNYPIYTKSSIQDRVQKFVDTQLYDFKSFEIGFEELKKAVAANAQRSDTFGSRISKKPKPEEVAIGYESITGLKYRKPRSVVGTKR

SEQ ID NO: 1132 - protein, 211 aa, Porphyromonas catoniae
MGKKVLGLDLGVGSIGWCLITLDKDEKPQSILGMGSRIVPLSADDATEFTQGKAITKNKMRTVARTIRKGMDRYQLRREALKKVLREHAMLPDEALIKLPLLELWELRARAATPGEQVSLTELGRVLLHINQKRGYKHAKADEAAEAETKKGKETGYVAQVKGRYQILKEKGLTIGQHFAGELRANQQTAPRGTYYTYRIKEQVYPRVRGV

SEQ ID NO: 1133 - protein, 1009 aa, Porphyromonas catoniae
MRIIREAYIEEYDRIMAVQRVFYPELLTDALIGRIRDRIIFYQRPLKSCKQLVSFCEFEKKEKVIRVKHTNKEGVQELVEKTITIGPKVAPKSSPIFQVCKVWESIHNIRLYHPDGTERKLEQEEKQKLFDYLQRNDKLSLTTLRKELKIKPKDKLWCDKLLEKGIAGNTTAAILRKAFKGYEHYERLFRFDLVRRDSHEADEDGVIRPIIDESYQNEPLYKLWHILYSIEDRAEMRSALIGQLGIKAEDLDNGLMDALYKIDFVKQGYGNKSAKFICKLLPHLQEGKMYSEAAEAAGMRHSDSMTAQERDERNLLEEIPLLQKNALRQPVVEKVLNQMINLVNALKREHGEIDEVRVELARELKMSREEREKATKNNSSREKENKAIAERITEYGLTPTKSRIQKYRLWQESAESCIYCGKRVDVVQFLRGEETEVEHIIPKSILFDDSLSNKACACRSCNQEKGNRFAMEYIQAKGWEQDYIERVDSLFHDKKISYSKRQHLLMLPKDLPEDFIERHLRLSQYISREAQGILRKGIRLVSASEGGVTAKLRQLWGYDNILRDLNLERYKSMGETEVVTVEHRDGQRTDERIKDWSKRKDHRHHAIDALVVACTRQSYIQRLNRVNAEADRQEMDAFIKEQQQEHKLSKKEKLSLLENWLKEQPHFTTGEVKEHAEGILISFRPGKRTVSRGRNIYKRSGKTDVQRNVLIPRGALSEETVYGVISVDGENKVVCKYPLQKFLDTKETNVDKIADQAAEKIVDKVLREKIRERIKRYGKKEAFAEPLYLDEAQTQVVRSVRCFISKDQAKLIPLRYNDESEAVGFVAPGNNHHLALYRDASGKMRASVVSFFAAVERARYGIPMIVLNPRETREKARIIPDLPESIFSKLPEEDWVLEETLQEGEMVLLGMENDAIEEAIKKKDYSKLSRYLYRVQSLSYNDYKFCFHLETESEKKEKKKGEDKKRGEKAKNTAVMPPKRYRIRCLATYQEDLNPRKVKIDLLGRISLA

SEQ ID NO: 1134 - protein, 1197 aa, Porphyromonas sp.
MLMSKHVLGLDLGVGSIGWCLIALDAQGDPAEILGMGSRVVPLNNATKAIEAFNAGAAFTASQERTARRTMRRGFARYQLRRYRLRRELEKVGMLPDAALIQLPLLELWELRERAATAGRRLTLPELGRVLCHINQKRGYRHVKSDAAAIVGDEGEKKKDSNSAYLAGIRANDEKLQAEHKTVGQYFAEQLRQNQSESPTGGISYRIKDQIFSRQCYIDEYDQIMAVQRVHYPDILTDEFIRMLRDEVIFMQRPLKSCKHLVSLCEFEKQERVMRVQQDDGKGGWQLVERRVKFGPKVAPKSSPLFQLCCIYEAVNNIRLTRPNGSPCDITPEERAKIVAHLQSSASLSFAALKKLLKEKALIADQLTSKSGLKGNSTRVALASALQPYPQYHHLLDMELETRMMTVQLTDEETGEVTEREVAVVTDSYVRKPLYRLWHILYSIEEREAMRRALITQLGMKEEDLDGGLLDQLYRLDFVKPGYGNKSAKFICKLLPQLQQGLGYSEACAAVGYRHSNSPTSEEITERTLLEKIPLLQRNELRQPLVEKILNQMINLVNALKAEYGIDEVRVELARELKMSREERERMARNNKDREERNKGVAAKIRECGLYPTKPRIQKYMLWKEAGRQCLYCGRSIEEEQCLREGGMEVEHIIPKSVLYDDSYGNKTCACRRCNKEKGNRTALEYIRAKGREAEYMKRINDLLKEKKISYSKHQRLRWLKEDIPSDFLERQLRLTQYISRQAMAILQQGIRRVSASEGGVTARLRSLWGYGKILHTLNLDRYDSMGETERVSREGEATEELHITNWSKRMDHRHHAIDALVVACTRQSYIQRLNRLSSEFGREDKKKEDQEAQEQQATETGRLSNLERWLTQRPHFSVRTVSDKVAEILISYRPGQRVVTRGRNIYRKKMADGREVSCVQRGVLVPRGELMEASFYGKILSQGRVRIVKRYPLHDLKGEVVDPHLRELITTYNQELKSREKGAPIPPLCLDKDKKQEVRSVRCYAKTLSLDKAIPMCFDEKGEPTAFVKSASNHHLALYRTPKGKLVESIVTFWDAVDRARYGIPLVITHPREVMEQVLQRGDIPEQVLSLLPPSDWVFVDSLQQDEMVVIGLSDEELQRALEAQNYRKISEHLYRVQKMSSSYYVFRYHLETSVADDKNTSGRIPKFHRVQSLKAYEERNIRKVRVDLLGRISLL

SEQ ID NO: 1135 - protein, 1422 aa, Prevotella denticola
MTQKVLGLDLGTNSIGSSVRNLDLSDDLKGQLEFFSSDIFRSSVNKESNGREYSLAAQRSAHSRSRGLNEARRRKLWATLDLLIKYGFCPMSPESLMRWRTYDKQRGLFREYPIDDKNFNAWILLDFDGDGKPDYSSPYQLRRELVIRQFDFDQPIERYKLGRALYHIAQHRGFKSSKGETLSQQETNSKQSLTDDTADVAGEMKASEEKLSKGLSTYMKENNLLTVGAAFAQLEDEGVRVRNNNDYRAIRSQFQREIETIFKFQQGLSVENELYERLVSEKKNIGTIFYKRPLRSQRGNVGKCTLERTKPRCAIGHPLFEKFRAWTLINNIKVRMSEEEQAEQLPMKLRFELYNDCFLAFVRAEFKFEDIRKYLEKRLGVHFSYNDKTINYKDSTSVAGCPITARFRKLLGEDWESFHVDGQKQRQAHGKNNASFHTVSYSTNDIWHFCYDAEEPEAVLSFAQDNLKWEKKKAEELVRIWSAIPQGYAMLSQKAIRNINKMLILGLKYSDAVLLAKVPEIVEITDGEILSVTEDYHRVEAQVGYEKQINNIVNALIAKYKSASEEYRFADHNYEYQLDKSDEKDIIKQIESNIGTRKWSLLDADEQTDILQKVRDKYQNFFRSHERKFVESPKLGECFEEYLMKKFPMVEGERWKKLYHPSQIAIYRPVPANKDRSALRLGNPDIGAIKNPTVLRVLNTLRKRVNQLLDDGIISPDETRVVVETARELNDANRKWALDTYNRIRHDENEKIKKILAEFYPKRDNISTVDIDKARYVIDQREMDYFTEAKTYHKDIKKYKLWLEQGGQCMYTGRTINLSNLFDPNSFDVEHTIPESISFDSSDMNLTLCDAHYNRFIKKNHIPADLPNYDKSVVIDGKEYSPIKPRLQRWADRVERLNRNVEYWRGQARRAQNKDRKDQCMREMHLWKMELEYWTKKLERFTITEVTDEFKNSQLVDTRVITRHAVLYLKSIFPHVDVQRGDVTAKFRKILGIQSVDEKKDRSLHSHHAIDATTLTIIPGAAKRERMLELFAKIEEVNKMLSFSGNEDRTGLKQELDGLKNQLNKEVKACRIGHNVSEIGTFINDNIIINHHVKNQALTPVRRRLRKRGHIVGGMDNPRWQTGDALRGEIHKASYYGAITQYAKDKEGKVLMKEGRPQINPTIKFVIRRELKYKKSSTDSGFASWDDLGKAIVDKELFALMKGQFPEGTSFKDACEQGIYMIKKGKNGEVDTKLYRIRHIRCKTKQKNALKIKEQAYKSEKEYKRYFYAAVGDLYAMCCYTNGKTREFKIYSLYDISCHRKVGVEDIPEFITDKKGNRLMLDYKLHTGDMILLYKENPEELYDLDNVSLSKLLYKINGFENDGLRIRMVNHLVAKEAMGESVKDYAKLPDIIRCGVKTIKFLVMGENRDFVIKNGKISFNHR

SEQ ID NO: 1136 - protein, 443 aa, Prevotella disiens
MELDYWKGKYNRFTMTEIPEGFSRRQGMGIGLISRYAGLYLKTIFHKKDNPQKSNVYIVKGSITAEFRRIWNIQDDYEKKCRDNHIHHCIDAIVVGCIGKREYDLMAQFYRDEEKYRWEKKKKPFFKKPWETFTQDMLSLKDEVLTVHFNPSNFTKKAHKKVFTPKGIFVAQGDCARVKLHKESYFGAIEQKGEIKYVMRKELSALKIEDIKNIVDAVVKEKVLAVVKKKGFKQAMAEPIYMNEDKRILIKKVRLFVSQTNPLIVKKHRDLSSKEYKQNYYVDNEGNLMIAMYEGVKKNGKIDREITVVNNLEAAKFFRQSQKNNAEKQLISHLSPKNGYPLKTVLTQKQLVLMYEDSPKEIKLRDTKNMVKRLYQVVEIEKDGRVKLKFHQEARSEGLNKNSAAFKIQDTPESLYRHTKSNLKVLVNGVDFKINILGEISLI

SEQ ID NO: 1137 - protein, 1375 aa, Prevotella histicola
MKKILGLDLGTTSIGWALVYESENTDEKSSIVRLGVRVNPLSVDEKGNFEKGKAITTNADRQQTHGARINLQRYKLRRENLKDCLQKQGWIGTEALCEEGKTSTFETYMLRAKAAEEEISLHELCRVLFMMNKKRGYKSNRKANNKEDGKLFDGMTVAKKLYEEHLTPAEYSFQLLSSGKKFKQEYYRSDLKEEFDRIWNEQQKYYPEILTDDFKQQLQGKSKGNTSKIFLGKYGIYSADLKGLDRKLQPLKWRVEALKQQVDKEVLAFVISDLNGQIASTSGLLGAISDRSKELYFNKQTVGQYLWTSLKETPHVSIKNKPFYRQDYLDEFEKIWETQATYHKELTPELKQEIRDIIIFYQRPLKSKKGLISVCELEQRKVKVTIDGKEKEISIGPKVAPKSSPMFQEFRIWQNLNNILLIDKGNNSIHPLYEEEKNLLYEELSVKEKLSKAEALKVLNKNSKQWDLNYKEIEGNRTQAVLYDCYNRIIVMTGHEEYNFKKLKASEIRSYVKTTFTGLGFNTDILEFDSSLTGHELEKQPMYQLWHLLYSYESDNSRTGNDALLRKLETAFGFPKEYAAVLSDVVFEDSYGNLSVKAMRKILPHLQAGLNYSQACEEAGYKHSRRSLTKNELDQKEYKEKLELLPKNSLHNPVVEKILNQMINVINAVIDEYGKPDEIRIELARELKIGAAERENMTRSINQGNAENKRIREILEKEFALSYISRNDIIKYKLYEELKSNGFKTLYSDTYISKDKLFSKDFDIEHIIPKARLFDDSLSNKTIEARDVNIAKSNKTAFDFISEKYDQQGIEAYKKKLDILLQDGSISKAKYNRLLMKEADIPSGFIDRDLRDTQYIAKKAYEILSDLVRNVTPTTGAVTSRLREDWQLVDVMKELNFEKYQKLGLVEVIEDRDGRKIKRIKDWTKRNDHRHHAMDALTIAFTKPSYIQYLNNLNARSDKNSSIYGIENKELHREDNKLRFNAPLPINEFRAEARRHLKSILVSVKAKNKVMTQNVNVIKTKHGVIKKVQLTPRGELHNATFYGTKKRPIIKMVKVGAALDEVTIKKVSSSFIREALLDRLHEYNGDAKKAFTGRNSIDKNPIYIDEEHKKTVPALVKTIEWEMYHPTRKLISPDLKIDKVIDKGIREILKTRLAKFNGDAQKAFSNLDENPIYKDEAKKITLKRVSLEGVSSVIPLHTLKDREGKLVVGKDGKPVLGDYVQTSNNHHIAFYMDENGNLQDNVVSFFEAAERKSQGVPVIDKNYNHDKGWNFLFTMKQNEYFVFPNEVTGFNPSEVDLMDEANYSIISPNLYRVQKMSKASGRDYWFRHHLEAMLNDDPKLRNSMFKRITSLKALEGIVKVRINCIGKIVAVGEYD

SEQ ID NO: 1138 - protein, 1380 aa, Prevotella intermedia
MKRILGLDLGTTSIGWALVNEAENNNEASSIVRLGVRVNPLTVDEKSNFEKGKAITTNADRQLRHGARINLQRYKLRRQNLHDCLQKQGWLGTEAMYEEGKASTFETYKLRAKAAEEEISLHEFARVLFMLNKKRGYKSNRKANNKEDGQLFDGMTIAKKLYEEHLTPAEYSLQLLNKGKKFTQGYYRSDLNAELERIWDEQKKYYPEILTDEFKQQLEGKTKTNTSKIFLAKYGIYSADLKGLDRKFQPLKWRVEALQQQVDKEVLAFVISDLKGQIANTSGLLGAISDRSKELYFNKQTVGQYLWASLEENPHISIKNKPFYRQDYLDEFEKIWETQAAFHKQLTPELKQEIRDIIIFYQRPLKSKKSLISVCELEQRKVKATIDGKEKEITIGPKVAPKSSPVFQEFRIWQNLNNVLLIDNDTNEKRPLDEVERNLLYKELSIKAKLSKTEALKILNKKGKQWDLNYRELEGNRTQAILFDCYNRIITLTGHEECDFKKIKASEIRHYVSTIFKNLGFSTEILDFDPSLKKHELEKQPMYQLWHLLYSYESDNSRTGNESLLRKLETTFGFPEEYATVLCDVVFEEDYGNLSVKAMREILPYLQAGNDYSQACAYAGYNHSRHSLTKEELDQKVYKERLELLPKNSLRNPVVEKILNQMINVINAIIDEYGKPDEIRIEMARELKSSAADRKKTTHAISQGNAENQRIREILEKEFSLSYISRNDIIKYKLYEELEPNYYKTLYSDTYITKDKLFSKDFDIEHIIPKARLFDDSFSNKTLEARNINLEKSNKTAFDFIKEKYGEDGAEAYKKKLDMLLENDAISRPKYNNLLRAEADIPSDFINRDLRNTQYIAKKACEILGELVKTVTPTTGKITNRLREDWQLVDVMKELNFEKYEKLGLTEIVEDRDGRKIKRIKDWTKRNDHRHHAMDALAIAFTKPSFIQYLNNLNARSNKGDSIYAIENKELHYEEGKLRFNAPIPVNEFRAEAKRHLSAILVSIKAKNKVMTQNVNKIKTKHGIIKKIQLTPRGPLHNETIYGTKMRPIIKMVKVGAALDEATINKVSSPAIREALLKRLNEYSGNAKKAFTGKNTLEKNPIYLNAGRTKTVPSLVKTVEWESFHPTRKLIDKDLNVDKVVDKGIREILKARLEEFNGDAKKAFSNLEENPIYLDEAKKIALKRVSIEGVLSAIPLHTLKNQAGKPITGKDGKPVLGNYVQTSNNHHIAFYYDEDGNLQDNAVSFFEAAERKSQGIPVIDKDYNRDKGWRFLFTMKQNEYFVFPNEATGFIPSEVDLTDEANYGIISPNLYRVQKVSRIDKGTSASRDYWFRHHLETILNDDAKLKNLAFKRIRGLLELKDIIKVRINSTGKIVAVGEYD

SEQ ID NO: 1139 - protein, 129 aa, Prevotella multiformis
MQKGGTGCKINRQTVGNVEVNVLNLRLYDRTDDREVTAGYLPTKEDYVRLFVYLNDRKEINQDTLLKDYFRLKKVKCGNEKEFAIRWNYIEDKEKKYPCNETRHELLAALDRAGMEHGWLDDSGTSARW

SEQ ID NO: 1140 - protein, 535 aa, Prevotella multiformis
MVKGLLSNIVRTAEEREETSKFVISCTGRITDRLKQDWGLNDVWNSLVYTRFKRLNELTETEAFGHWQDKDRRVFQTSVPLELQRGFSKKRIDHRHHAMDALVIACASRNIIGYLNNESAESPEKREDLRRKLCDKNHIIRKPWESFTQDARAALEDIVVSFKNYVRIINKATNYYERYDADGRKTKAEQKGGEMWAVRKPMHEATYYGKVNLRRKERVSLKAALEDIPSICNRDLRDYINGLVEKHFNKEQVLAQFRSVGNRWNKQHIDKVDVWRFSDGKEEMVATRKPLDTSFDAKRIEAVTDTGIQRILSNYLEAKGGDPKIAFTPEGIADMNQHITAYNNGKQHKPILKVRVSTKLGKKYPVGQTGCKAGQFVVAEAGTNLYFAVYEDGEGNRSYDTIPLNEAVECLKQGLPPVPETREKGDRLKFYLSPNDLVYVPAGDEENEIDRERIYKFVDSSGTTANFIPHRTAGLIYNVDKKLAEALCNGSIIQNEYGVGSQQSKNQKALTGEMVKAVCWKLEVDRLGNILRIIK

SEQ ID NO: 1141 - protein, 1380 aa, Prevotella nigrescens
MKRILGLDLGTTSIGWALVNEAESNNEASSIVRLGVRVNPLTVDEKSNFEKGKAITTNADRQLRHGARINLQRYKLRRQNLHDCLQKQGWLGTEAMYEEGKASTFETYKLRAKAAEEEISLHEFARVLFMLNKKRGYKSNRKANNKEDGQLFDGMTIAKKLYEEHLTPAEYSLQLLNKGKKFTQGYYRSDLNAELERIWDEQKKYYPEILTDEFKQQLEGKTKTNTSKIFLAKYGIYSADLKGLDRKLQPLKWRVEALKQQVDKEVLAFVISDLKGQIANTSGLLGAISDRSKELYFNKQTVGQYLWASLEENPHISIKNKPFYRQDYLDEFEKIWETQATFHKQLTPELKQEIRDIIIFYQRPLKSKKSLISVCELEQRKVKATIDGKEKEITIGPKVAPKSSPVFQEFRIWQNLNNVLLIDNDTNEKRPLDEDERYLLYKELSIKAKLSKTEALKILNKKGKQWDLNYKELEGNRTQAILFDCYNRIITLTGHEECDFKKIKASEIRHYVSTIFKNLGFSTEILDFDPSLEKHELEKQPMYQLWHLLYSYESDNSRTGNESLLRKLETTFGFPEEYATVLCDVVFEEDYGNLSVKAMRKILPYLQAGNDYSQACAYAGYNHSRHSLTKEELDQKVYKERLELLPKNSLRNPVVEKILNQMINVINAIIDEYGKPDEIRIEMARELKSSAADRKKTTHAINQGNDENQCIREILEKEFALSYISRNDIIKYKLYEELKPNGFKTLYSDTYIPKDKLFSKDFDIEHIIPKARLFDDSYSNKTLEARDINLAKSNKTAFDFVKEKYGEQGAEAYKKKLDMLLGNNVISKPKYNKLLMTEADIPSDFINRDLRNTQYIARKACEILGELVRTVTPTTGKITNRLREDWQLVDVMKELNFEKYEKLGLTEIVEDRDGRKIKRIKDWTKRNDHRHHAMDALAIAFTKPSYIQYLNNLNARSNKGDSIYAIENKELHYEEGKLRFNAPIPVNVFRAEAKRHLSAILVSIKAKNKVMTQNVNKIKTKHGIIKKIQLTPRGPLHNETIYGTKMRPIIKKVKVGAALDEATINKVSSPAIREVLLKRLNEYSGNAKKAFTGKNTLDKNPIYLNAERTKTVPASVKTVEWENYHPIRKPITPDLKVDKVIDKGIGEILKARLEEFNGDAKKAFSNLEENPIYLDQTKKIALKRVSIEGVLSTIPLHTLKNQAGKPIMGKDGKPVLGNYVQTSNNHHIAFYYDEDGNLQDNAVSFFEAAERKSQGISVIDKDYNRDKGWRFLFTMKQNEYFVFPNEATGFIPSEVDLTDEANYGIISPNLYRVQKMSRIEKGTSVSRDYWFRHHLETILNDDSRLKNSAFKRINSLKPLEGIIKVRINSIGKIVAVGEYD

SEQ ID NO: 1142 - protein, 1506 aa, Prevotella nigrescens
MKTILGLDLGPNSIGWAKVEVDDEGNYLRNIKLGSRIIPMTQDMLGDFDKGVKVSQTAIRTDFRGNRRLIERHLLRRERLHRVLHALKFLPKHYEDAIGWDRNEPATYGKFVNNSEPKLAWERQEDGSMRFLFMESFNEMVADFAQNQPSLVSDGKKIPLDWTIYYLRKKALTRPIKKEELAWILLNFNQKRGYYQLRGEEEEDNLTKRKEYYKLKVVGVEADGAPKGGKTWYNIHLENGWTARCQSKIPLDDWVGKVKEYIVTTEYEDDGKTPKCDKEGKVKRSFKSPEKDDWQLIKTRTEKFIDDSNKTVGAFIYDYLLEKPFDKIRGKYIRTIERKYYKNELREILREQTKYHEGLHSLEALKICAEELYKNNQQHQEYLLKKDMTFLLLNDLIFYQRPLKSKKSLIADCPYEVYKYDDKLTGKKGQKKIKCIAKSNPYYQEFRLWQFIANLRLFSVTDGKEVTAEYLKTEEDYVRLFSFLNDRKDIKQETFLRSFLKLKKESIGSEKIYPIRWNYIEDANKSYPCNATRHELLLAFDRADIPRELLDVEEREYRLWHLLYSIEAKEETESALRKLKANKAFGDLNIDDAFVNSFLKIKPFEKEYGAYSEKAIKKLLAVMRRGSLWKEADICEATKQNIAKILQNDIDEKLKKKIEAAVSSFNKLSDFQGLPTWLACYVVYGRHSEAAQIQCWQSPEDLKTYINKFKQHSLRNPIVEQCLLETLRTVYDIWKDAGQIDEIHIELGRNMKSTAEQRARKTKDILRNENTNLRIKNLLVELKNDDKIENVRPYSPSQQEILRIYEEGALQELSKEDEMFEDISKISKMAQPSPTELSRYKLWLEQKYRSPYTGRVIPLSKLFTTAYQIEHIIPQSRYFDDSFNNKVICESEVNSLKDNMLGYEFIKECGGRIVHCTLLGDVKIFTKEEYKDFVTKHYIDNTYKRDKLLLEDIPQEFSARQLNDSRYISKMVQTVLSNIVRAENEQEATSKFVVSCNGAITNRLKKDWGLNDVWSSIVCPRFKRLNEITKTNAFGHWEDKAGKHVFQTTVPLELQRGFSKKRIDHRHHAMDALVIACASRNIVNYLNNESANSPEKREDLRKKLCDEKRKIRKPWKTFTQDAREALSDVVVSFKNYVRVINKATNYYEHYSSSGNKVMISQKGNDMWAIRKPLHKESVFGRVNLCRKVIVSLKKALENIPAICDKTLRDYINALVEKHFNTRQLLAHFKSINYRLNRQCVEKVEVWQFSDEKIEMVARRKSLDTSFDDKQISSITDTGIQKILLNYLQTKDGNAEIAFTPEGIEEMNKNISLYNDGKAHQPILKVRVATPKGMKYPVGQTGNKATKFVVAEKGTNLYFAIYENELGVRSYDTIPLNIVVERLKEGLSPVPQANEADIPLKFYLSPNDLVYVPTKENEDELCRDRIYKFVDSSGTTANFVPHTSANTIYNVDKEYAEKCCNGAVFLNEYGLGSPQSKNQRALTGEMIKEICWKLKVDRLGNIIKVIK

SEQ ID NO: 1143 - protein, 774 aa, Prevotella oulorum
MEQCILETLRTVYDIWKEAGQIDEIHVELGREMKQTAEQRAHLTEKVLRNENTNLRIKSLLMELKNDADMKDVRPYSPMQQEILRIYEEGALQTLSKDDAAFTEIMKISKMAQPSASELQRYRLWLEQKYRSPYTGKPISLSKLFTSAYQIEHIIPKKRYFDDSFSNKVICEAEVNGKKDSMLAYEFIKDCGGDVIHCTTLGDVTILSEAEYKALVTELYANNKSKKDKLLMEDIPQDFINRQLNDSRYISRVVMTLLSNIVRIEGEEEATSKFVIPCSGGITDKLKKDWGLNDVWNNIVYPRFERLNALTNTSDFGQWENKEGKRVFQTSVPLELQRGYQKKRIDHRHHAMDALVIACASRKIINYLNNQEANDPTKQENARKQLCIKSRIIRKPWETFTQDAYKALDNIVVSFKNYVRVINKATNYYERYNADGKKAVDEQKGEAMWAIRKPMHKDTVFGHVNLRRKAVVKLKDALENIPAICDKTLRHYIQDLQKKHFNTKQLLAHFKSINYRLNKQAVDKVEVWQYSDDKEQLAATRKPLGPSFDAKCIAAITDTGIQKILLNYLQAKGGDPAIAFTPEGIAEMNQNIAVYNGGKQHQPILKVRIAKPMGKKFPIGQTGNKAFQYVIAEEGTNLYFAIYEDEEGNRTYDTIALREVVERLKQGLTPVPEKNEKGVALKFHLSPNDLVYVPTADELLSKVCSLDKNRIYKMVSATKSECLFIPHSVAKTIYDKVEFEALNKMGRALTGEMIKSVCWKIEVDRLGHIVNIIK

SEQ ID NO: 1144 - protein, 691 aa, Prevotella oulorum
MKTILGLDLGTNSIGWAKVIVDDNENYLRDIQLGSRIIPMSQDVLGKFDKGVTESQTAIRTSFRGVRRLRERTLQRRERLHRVLHTLHYLPPHYDSAIGWDRKTPTTYGKFLNHGEPKLAWERREDGTMQFLFMDAFHEMIADFAKYQPALVADGKKVPLDWTIYYLRKKALTQPIKKEELAWILLNFNQKRGYYQLRGEEDEENAAKHEEYHELKVVGVEVDEAGKGDNTWYNVKLENGWTYHRQSKIPLDDWVGKVRAFIVTTEYEKDGTTPKKDKEGNVKRSFRSPDEKDWGLRKKQTEHSLEASGTPVGAFIYDHLLKEPSDKIRGKFIHTIERKYYKQELAAILREQSKHHEKLCSKDMLKACIEELYPNNPLHRESLLKKDMPYLLIEDLIFYQRPLKSKKSLIAECPYEAYSYVDKETGEMKRQGIKCIAKSNPYYQEFRLWQLIANLRLRNRSDERDVTAEYLPHQEDYVRLFTYLNDRKEINQETLLKDFFKLKKVTIGGEKVFPIRWDYIEDKEKKYPCNATRHELLLALDRAGIEHDWLNDRDLAYRLWHLLYSVDSKDETERALRKLKDDDAFVESFLKIKPFEKEYGAYSEKAIKKLLPVMRRGSLWNEADLCPSTKERIANILQGTIDEKLKKKIGAFISSCQQVSDFQGLPEWLACYVVYGRHSEATDIQRWETPE

SEQ ID NO: 1145 - protein, 242 aa, Prevotella saccharolytica
MKLVLGLDLGVGSVGWALIFITDSGEPIKILALGERIVSMDSNNSNEFSAGATCTLNQKKTKAKSVRKGYSRYVQRRDALTAELRHIGMMPDETLIKLPVLDLWQLRANAATEGKKLSLAEIGRVLYHINQRRGYKHGKSDVSSDNKQKGYVKAVNERYCMIQERQQTIGQYFALKLKETAVTTEKGTFYTFRIKDQVFPREAYEEEFVVAYSTKVLKFKQITTLLNVVICLMMLLLIVQRY

SEQ ID NO: 1146 - protein, 1174 aa, Prevotella sp.
MEFHPELCDAELLKACAEELYRNNEAHRAQLLAKDFKHLLVEDVLFYQRPLKSKKSLIANCPYETRQYINKETGEIKDVNVKCIAKSNPYFQEFRLWQWISNLRLLRQADGQDVTAAYIKGNEDKERLFDLLNNQGEIKQEHILRDFLKLKKPKGGEFPLRWNYVDDKIYPANETRHAINKAIKGMAVDKEEKETLGQLLDQPAVAYMLWNLLYSITDRNELARALRRFALTHGVSSVDAFVESFLKVKPFKKEYGAYSEKATKKLLQVMRLGKYWCGDELPEPAKRTKGNKQAVYDEMAHRGICKQTLQNISNIIEENIDERLMGALLNPERPLTELSHFQGLSVSDACYVVYGRHSEVAEIVKWKDADELNTFINNFKQHSMRNPIVEQCVLETLRTVRDVWEQEGQIDEIHVELGRNMKRTAEQRARDTQAIQRNENTNMRISLLLTELKNDPSISDVRPYSPSQRELLKIYEEGALENLTNQDEDIAKISRLAQPSASELRRYKLWLDQKYVSPYTGRPIPLAKLFTPAYEIEHIIPQSRYFDNSFSNKVICEAEVNKLKDNLLGMEFIKKFGGKTKGILDEEAYKLHVTTNYAHNPAKRSKLLMEDLPTDFNSRQLNDTRYISKTVMALLSNVVREEGERETRSKHVVVCTGGVTDTLKKDWGLHDVWHNLVYPRFIRLNNLTGSQNFGYWRYLNEENSKKGEDSKKVFQITLPPECQRGFVKKRIDHRHHAMDALVIACASANIVNYLNNQSAANPHIHENLQRLLCDRKREIRKPWPTFTQDAQAALKDLVVSFKNTVRVVNKASNTYLRYDKDGKKKRFKQEGEGLKAIRKPMHKETYYGEVNLIRKEMVPLKRALDDVNAIVDKELRASIKGLLRDGFNPQQVLANFKAKDFKFDKRDIKKVEVYVSSEKSTPMVATRKSLDTSFNAKRIADITDTGIQKILLNYLKANDNSPEQAFTPEGIAYLNEHIAEYNDGKPHQPILKVRVSEVKGAKFAVGQTGSKKDKFVEAQSGTNLYFAIYEDKEGKRHFETIALKVAAERLKDKQMPVPEINDAGLPLKFYLSPNDLVYVPTDEDRATAHPSIDKMRIYKMVSATDRQCFFLPFTVASVISNKVEFEALNKMERVLDASEYSSAYDSSHVNKVMVKNVCWKLEVDRLGNITKIVR

SEQ ID NO: 1147 - protein, 992 aa, Prevotella sp.
MITRILGLDTGTNSLAWAVVDRDANGNYTLVKRGDVIFTEGVKIEKGIESSKAAERTAHKALRVHYSRRRLHKIDTLKVLVELNLCPCLSDEQLSQWKAKKTYPLTDDFMLWQRSGSAEENNPYYCRHRCLTQKLDLTDQSQRFLLGRAFYHLAQRRGFLSNRLDTSADSDESGKVKSGIAQLSVEMEKAGCEFLGEYFYQLYKQHGNTIKLRSRYTDREEHYKKEFLAICEKQELDPKWVEALQRAIYFQRPLKSQRKGVGKCTFEPKKPRCAESHPDYEAFRMLCFLNNVKIQTPNDTSLRPLNEDEREKIWPIFFRKSKPNFDFEDIAKALAGKNNYAWYKDAGEKPFKFNYRMQQGVSGCPVTAQLIDIFGSDWQTAIAETYTAVEKKNGTKTIDEMADDVWNVLYSFSSKDKLKAFATEKLQLDEASATKFANAKLPHGFASLSLKAIRNILPFLRQGFIYAHAVHLAKIPDIVTKAVWNDADKREMILSGLMEIIENYNPKDRGVEGTIDFCIKSHLQDVIDLRPGAADALYHPSMIETYPDAKLNKMGVFQLGSPRTNAIRNPMAMRSLHILRSVVNQLLRDGIIDRDTEVHVEYARELNDANKRKAIADYQREQEKKRKQYRDDIIALYKSECHKEIEPTDTDILKFQLWEEQNHLCLYTGTQIGICDFLGDNPKFDIEHTVPRSVGGDSTQMNLTLCDATFNRQVKGAQLPSQLSNHADILVRIDHWKSKCEDLRKQLDKIRTYGGMEKNMKDRLIQKRHRLKMDLDYWQGKYSRFTMTEVPEGFSRRQGAGIGLVSKYAGLFLKSLFHNEQNPNKSNVYVVKGVTTAEFRRMWGLQGEYEKKSRLNHCHHCIDAITIACIGKAEYDKMAQYYHDEELFQWRGTTTKPHFNKPWPTFTEDVLAIEQSLLVKHLTKDNMPKQAKKRVRTATGKYLAQGDTARGSLHKDTYYGAIEQNGEIRYVLRKPLNKFENEAELEKIVDQA

SEQ ID NO: 1148 - protein, 1375 aa, Prevotella sp.
MKKILGLDLGTTSIGWALVNESENKDEQSSIVRLGVRVIPLTVDEKGNFEKGKAITTNADRQQVHAARINLQRYKLRRENLRDCLQKQGWIGSEPMCEDGKSSTFETYKLRAKAAVEEVSLHEFARVLFMLNKKRGYKSNRKANDKEEGKLFDGMTIAKKLYEEHLTPAEYSLQLLNTGRKFTPEYYRSDLIEEFEKIWNEQQKYYPEILTDEFKQQLEGKAKSNTSKLFLGKYGIYSADTKGLDRRLQPLKWRVEAMKQQVDKDVLAFVISDLKGQIANTSGLLGAISDRSKELYFSKQTIGQYLWASLQENPHISIKNQPFYRQDYLDEFEKIWETQATYHKELTSELKQEIRDIIIFYQRPLKSKKNLIAVCELEQRKVKVTVDGKEKEITIGPKIAPKSSPMFQEFRIWQNLNNILLLDHETNSKRPLYEEERNLLYEELSVKEKLSKTEALKVLGKKSKQWDLNYKELEGNRTQAVLYDCYNRIIVMSGHEECNFKKLKASDIRHYVKMIFKNLAFNTDILCFDSSLKGHELERQPMCQLWHLLYSYEGDNSRTGNDALLRKLETSFGFPKEYAAVLADVIFEDSYGNLSVKAMRNILPHLQAGKDYSQACEEAGYKHSRRSLTKEELNQKVYKEKLELLPKNSLHNPVVEKILNQMVNVINAVIEEYGKPDEIRIELARDLKIGAAERENMTRSINQGNAENKRIREILEKEFALSYLSRNDIIKYKLYEELKSNGFKTLYSDTYISKDKLFSKDFDIEHIIPKARLFDDSLSNKTIEARDVNIAKSNKTAFDFILERYGEQGVKTYKTKLLRLLEDGAISNKKYNNLLKTEADIPSGFIDRDLRNTQYIAKKAYEILSELVKIVTPTTGSVTNRLREDWQLVDVMKELNFEKYQKLGLADVIEDRDGRKVKRIKDWTKRNDHRHHAMDALTIAFTKPSYIQYLNNLNARSDKSSSIYGIEVKELHREEGKFRFNAPLPINEFRAEAKRHLKSVLVSIKAKKKVMTQNVNKIKTKHGIIKKVQLTPRGELHNATYYGTKKRPLVRMVKVGAALDEATIKRVCSPAIRAALLKRLNAYNGDAKEAFTGRNSIDKNPIYLDIEQTKLVPVLVKTIEWGMYHPIRKRITPDLKIDKVIDKGIREKLKARLAEFNGDAQKAFSNLDENPIYMDEAKRITLKRVSIEGVLSAIPLHTLKDKAGKPVIGSDGKPVFGDYVQTSNNHHIAFYIDDKGNLQDNPVSFFEAAERKSQGVPVIDRRYNCDKGWHFVFTMKQNEYFVFPNEATGFIPSEVDLLDEANYCIISPNLYRVQKLSKASGRDYWFRHHLETMLNDDLRLKNSTFKRIQSLKGLEDIVKVRINSIGKIVAVGKYD

SEQ ID NO: 1149 - protein, 1483 aa, Prevotella sp.
MKTILGLDLGTNSIGWAKVSVDDYGNYLHDIKLGSRIIPMSQDVLGNFDSGVTVSQTAQRTEFRSKRRLVQRNLQRRERLHRVLHVLDFLPAHYDAAIGWDRTEAVTYGKFLNHAEPKLAWEELGNGKRRFLFMDSFHEMVADFARCQPALVADGKKIPLDWTIYYLRKKALTQAITKEELAWILLNFNQKRGYYQLRGEEEEENPTKQEEYYELKVVSVEATDSRKGNDTWYNVHLENGWIYRRSSKISLDDWVGKVKQFIVTTEYEKDGTTLKTDKEGNVKRSFRAPNENDWGLRKKRTETLLEMSGKTVGAFIYDHLLQEPADKIRGNFIRTIERHYYKAELEAILAEQCKYHIELRDKEMLEACARELYLNNLPHQRSLMKKDMTYLLLYDLIFYQRPLKSKKALIANCPYEYYEYVDKETGEIKRQNIKCIAKSNPYFQEFRLWQFVLNLRLFDRVEDKEVTANYLPTADDHARLFTYLNDRKEINQETLLKDYFKLKKVKIGNEKEYPIRWNYIEDKEKKYPCNETRYELLMALDRAGIEHKWLDDNNLEYRLWHLLYSVEVKSESETALRKLKNDDAFVNSFLKVKPFKKEYGAYSEKAIKRLLAVMRKGFLWNEQDICDETRKRIEIIIKGDVDEKVKERMGHAAYSFDRVSDFQGLPEWLACYVVYGRHSEAMDIQRWDSPERLMAYINNFKQYSLRNPIVEQCILETLRTVHDIWKETGQIDEIHVELGREMKSTSEERARRTQNVLRNENTNLRIKSLLIELKNDTDICNVHPYSPMQQEILRIYEEGALQELNREDEDFEEISKISQMSQPSGKELNRYKLWLEQKYRSPYTGKAISLAKLFTPAYQIEHVIPQSRYFDDSFTNKVICEAEVNTLKSNLLGYEFIKKHGGEIIHCTTLGDVRIFSESEYKAFVMDHYANNKSKKDKLLMEDIPQEFLSRQMNDSRYISKVVKTLLSNIVRMADESEATSKSVIVCTGGVTDRLKKDWGLNDVWNSIVYSRFERLNRLTGTEAFGHWENKDGKRVFQTSMPLELQRGFRKKRIDHRHHAMDALVIACASRNIVNYLNNESANNPKKREDLRRQLCDKNRVIRKPWETFTQDAYNALENVVVSFKNYVRVINKATNRYEHYDENGKKRFVQQKGSELWAIRKPMHKETYYGHVNLRRKELVTLQKALDDIPSICDKKLRDYISALVEKHFNKRQLLAHFKSTDYYWQKQYVNKVYVWTFSDDIKPLVATRKLLDTSFDAKRIGTITDTGIQKILRNYLEAKGGNATLAFTPEGIVEMNQNISKYNDGKPHQPILKVRITEPMGAKYRVGQTENKMAKYVEAQSGTNLYFAIYEDSEGKRSYTTVPLDEVAERLKQRLSPVPEKDENDVPLKFYLSPNDLVYVPTEEELQLRECKLNKDRIYKMVSSTGSECHFIPYYVANVIYNKVEFEAKNKIGRALTGEMIKAVCWKLEIDRLGNILKVIK

SEQ ID NO: 1150 - protein, 593 aa, Prevotella sp.
MNTRILGLDTGTNSLAWAVVDRDAKGNYTLVRRGDVIFTEGVNVDGQPVPSKAAVKSKYKSLRVQYARRRLRKIDTLKVLVSLDLCPYLSDQQLSQWKAKKTYPLTDDFMLWQRSGSAEENNPYYCRYRCLTQKLDLTDQSQRFLLGRAFYHLAQRRGFLSNRLDTTSDSAESGKVKSGIAQLSVEMEKAGCTFLGEYFYQLYKQHGNTVRLRSRYTDREEHYIKEFLAICEKQELDAQWVEKLQRALYFQRPLKSQRKGVGKCTFEPKKPRCAESHPDYEAFRMLCILNNIKIKTPKDVSLRPLNAEEREKVWPLFFRKSKPNFDFEDIAKALAGKNNYAWYKDAGEKPFRFNYRMHQGVSGCPVTAQLIDIFGSDWKAGIAETYTAVGKKNGTKTIDEMADDVWNVLYSFSSKDKLKAFATDKLQLDEARATKFANAKLPHGFAALSLKAIRNILPFLRQGFIYAHAVLLAKIPDIVTAAVWDDADKREQILSGLLEVIENYNPDDRGIEGTIDFCIKSHLQDVVDLRPGAADALYHPSMIEAYPDAKLNKMGVFQLGSPRTNAIRNPMAMRSLHILRSVVNLLLRDGMLS

SEQ ID NO: 1151 - protein, 1424 aa, Prevotella sp.
MTQKVLGLDLGTNSIGSAVRNLDLSDDLQWQLEFFSSDIFRSSVNKESNGREYSLAAQRSAHRRSRGLNEVRRRRLWATLNLLIKHGFCPMSSESLMRWCTYDKRKGLFREYPIDDKDFNAWILLDFNGDGRPDYSSPYQLRRELVTRQFDFEQPIERYKLGRALYHIAQHRGFKSSKGETLSQQETNSKPSSTDEIPDVAGAMKASEEKLSKGLSTYMKEHNLLTVGAAFAQLEDEGVRVRNNNDYRAIRSQFQHEIETIFKFQQGLSVESELYERLISEKKNVGTIFYKRPLRSQRGNVGKCTLERSKPRCAIGHPLFEKFRAWTLINNIKVRMSVDTLDEQLPMKLRLDLYNECFLAFVRTEFKFEDIRKYLEKRLGIHFSYNDKTINYKDSTSVAGCPITARFRKMLGEEWESFRVEGQKERQAHSKNNISFHRVSYSIEDIWHFCYDAEEPEAVLAFAQETLRLERKKAEELVRIWSAMPQGYAMLSQKAIRNINKILMLGLKYSDAVILAKVPELVDVSDEELLSIAKDYYLVEAQVNYDKRINSIVNGLIAKYKSVSEEYRFADHNYEYLLDESDEKDIIRQIENSLGARRWSLMDANEQTDILQKVRDRYQDFFRSHERKFVESPKLGESFENYLTKKFPMVEREQWKKLYHPSQITIYRPVSVGKDRSVLRLGNPDIGAIKNPTVLRVLNTLRRRVNQLLDDGVISPDETRVVVETARELNDANRKWALDTYNRIRHDENEKIKKILEEFYPKRDGISTDDIDKARYVIDQREVDYFTGSKTYNKDIKKYKFWLEQGGQCMYTGRTINLSNLFDPNAFDIEHTIPESLSFDSSDMNLTLCDAHYNRFIKKNHIPTDMPNYDKAITIDGKEYPAITSQLQRWVERVERLNRNVEYWKGQARRAQNKDRKDQCMREMHLWKMELEYWKKKLERFTVTEVTDGFKNSQLVDTRVITRHAVLYLKSIFPHVDVQRGDVTAKFRKILGIQSVDEKKDRSLHSHHAIDATTLTIIPVSAKRDRMLELFAKIEEINKMLSFSGSEDRTGLIQELEGLKNKLQMEVKVCRIGHNVSEIGTFINDNIIVNHHIKNQALTPVRRRLRKKGYIVGGVDNPRWQTGDALRGEIHKASYYGAITQFAKDDEGKVLMKEGRPQVNPTIKFVIRRELKYKKSAADSGFASWDDLGKAIVDKELFALMKGQFPAETSFKDACEQGIYMIKKGKNGMPDIKLHHIRHVRCEAPQSGLKIKEQTYKSEKEYKRYFYAAVGDLYAMCCYTNGKIREFRIYSLYDVSCHRKSDIEDIPEFITDKKGNRLMLDYKLRTGDMILLYKDNPAELYDLDNVNLSRRLYKINRFESQSNLVLMTHHLSTSKERGRSLGKTVDYQNLPESIRSSVKSLNFLIMGENRDFVIKNGKIIFNHR

SEQ ID NO: 1152 - protein, 241 aa, Prevotella sp.
QAVKEKIKEAIAGKNFKTAIAEPIFMNKEKGIRINKVRYYVKAQERLKIRQQRDLSSKEYKQFFCVENESNYLLAIYEGELKGKKERDFCVVNNLDSAACLKRSNKGKAAPLVPERSEERNLPLLAVLKRGTQVLFYENSPEEILFDNPQDLVRRLYKVTGINTKKDVKNGKTYLYGNIELRFHQNAQKKDDVKMQSGVYKNNEVLRQGIVLSHKQFKALVEGVDFEFNVLGEIKKKERHA

SEQ ID NO: 1153 - protein, 1216 aa, Prevotella stercorea
MTKILGIDTGTNSLGWAIVDKTADNYNLLDKGVNIFQEGVKIEKGIESSKAAERTEHRATRVRYYRIKLRKIRLLRILSDNHLCPPLSQEELSTWRLKKVYPKNELFMQWQRTDDDTEKTPYAYRHKCIHEKLDLSDVTDRYILGRAFYHIIQRRGFLSNRKEQGGEDSGKVKEGISTLTHEMNEAGYEYLGDYFYALYNKGEKIRKHYTARNEHFLSEFKAICEKQDLEKELGSEVVRNIEKAIFDQRPLKSQKGQVGKCVFEKNKTKCPSSHPMYEEFRMLTFINNIKIKTPNDDVLRPLNTGEREKIMPLFFRKSKKQFDFEDITKKLAPKKMYGFYKKEEDAEMPFLFNYPMDTSVSGCPVTAALKDVFGDDWITAICETYTLGEGKSRFDIVNDIWHALYFYSDKDKLAEFAINRLQLSEDEAKIFSEISLPADYASLSLKAICKILPYLRRGLIYSHAVFLGNLCEVMPKYEWSIKEMRETIIDNIIMEMDKCDTKDKRTFEVCIKDYLKGQYNVSDNSLKKLYHPSMIETYPRVQYTNEHGVYQLGSPRIDSVRNPMAMRSMFRLRKLVNRLLVEGKIDQNTEVHIEFARELNDANKRNAIALFVKENQSANDEARKQIITLFKKETGTDIEPTDKDILKYVLWEEQNHICLYTGKQIRISDFIGANPKFDIEHTIPRSVGGDSTKMNLTLCDSRFNREVKKTKLPVELPNHDEIMERIKEWKKNYELLDIQIRKNKKLSKGATTKEQKDTIIRKRHLLELRRDYWRGKYERFTMESVPEGFSRRQGTDISVISKYARLYLKSLFNRVYTVKGIATSDFRKIWGIQDIYSKKERINHVHHCIDAIVIACIGLDEYNKLGAYYHDEENNKWYGMSKASFKKPWATFVEDIKKIQDEILVYHYTPDNMPKQGRRRIKIDGKKILCKGDAARGSLHNDTYYGAIENDGAVKYVKRIDLASLEEKDVKNIVDDTVRSIIEAAIKEKGFKDAMASTIWMNEEKRVPIKKVRCFTPSITKPLNIRKQRDVSIKEYKQQYHVANDSNYLLALYIGTDNKGKEKREFEIVNILQAAQYYRTSNDKEVVDRHIVPIKSEHDYPFAYTLKIGTMVLLYEKSPNEVWDATIKERNRRLYKVTGLSTMRMKGRNGEYAYATVKLIHNEEARPSKDIKAKNGEYEQGEEFRPAIIMLHTQLNALVQGYDFEINELGEIRRLR

SEQ ID NO: 1154 - protein, 1487 aa, Prevotella timonensis; identical to SEQ ID NO: 130

SEQ ID NO: 1155 - protein, 770 aa, Pseudoramibacter alactolyticus
MAKGYFASDEEIDFSGVDDGFKNTLSSHQKFKEIFDVEVLNDWQKSMSEKIIFWATVYGDSKKFLKERLEDAYGNELDQKQIKRILGLRFKDWGRLSEAFLNLEGKNSKTNQSQTIIEALWNGDGTNNFNLMELLSSQFTYRDTLKKRALKGEKTLTNITYEDLSDLYLSPSVRRMVWQTILIVKELRQVLGAGPAKIFIEMARDVTLKAGTRTTSRRQQLLDLYKNVQTESRNWVEEIETQEESRFRSKKIFLYYTQMGQCMYTGEPIVFKDLFNRNLYDIDHIYPRHFVKDDSLINNLVLVKKQANSHKSDTFPIENSIQQARRDFWKWLSEKGLISREKFNRLTRRTSFSDEELAGFISRQIVETRQGTKAVAQIFENALPDSEVVYVKAGNVSDFRHHFNLLKCREINDLHHAQDAYLNVVVGNVYHTKFTKNPINFIKGYRKDRKAYAYHMDQIFDHPVKRNDIIAWQTDKNQSIATVKKVMAKGTPLVTRMSYEEHGELSNQNICSAKAAQKAEGKGYLPIKNSERLSNTQRYGGYNKYAGSYFFLVEHTLKKNRVRTIETMPLFLRDTIKTSKDLLKYCCESLKLEAPSIRVMKIKMGSLLSVNGAFVYLTGRSGKKLITPNGFQLILPQKWQDYIRLLIKTKDSPDDVEGISGGKNIEFYDILVEKHTKTCLKNRPNPIGEKLREWRNDFIALDNQKQSDILLEILKLTTFDNSGADLRAIGGKNQSGVSTIGKKISSQKSVVLVHRSVTGIFEKQVDLLSI

SEQ ID NO: 1156 - protein, 103 aa, Rhizobium etli
MSGEQLTREIGRSGVKASAVGLGTWAIGGWMWGGTDEAQSIAAIQASLDAGVTLIDTAPAYGLGRSEEIVGKALAGRRDKAVIATKCGLVWHTQKGNHFFDQD

SEQ ID NO: 1157 - protein, 1059 aa, Rhodovulum sp.
MGIRFAFDLGTNSIGWAVWRTGPGVFGEDTAASLDGSGVLIFKDGRNPKDGQSLATMRRVPRQSRKRRDRFVLRRRDLLAALRKAGLFPVDVEEGRRLAATDPYHLRAKALDESLTPHEMGRVIFHLNQRRGFRSNRKADRQDREKGKIAEGSKRLAETLAATNCRTLGEFLWSRHRGTPRTRSPTRIRMEGEGAKALYAFYPTREMVRAEFERLWTAQSRFAPDLLTPERHEEIAGILFRQRDLAPPKIGCCTFEPSERRLPRALPSVEARGIYERLAHLRITTGPVSDRGLTRPERDVLASALLAGKSLTFKAVRKTLKILPHALVNFEEAGEKGLDGALTAKLLSKPDHYGAAWHGLSFAEKDTFVGKLLDEADEERLIRRLVTENRLSEDAARRCASIPLADGYGRLGRTANTEILAALVEETDETGTVVTYAEAVRRAGERTGRNWHHSDERDGVILDRLPYYGEILQRHVVPGSGEPEEKNEAARWGRLANPTVHIGLNQLRKVVNRLIAAHGRPDQIVVELARELKLNREQKERLDRENRKNREENERRTAILAEHGQRDTAENKIRLRLFEEQARANAGIALCPYTGRAIGIAELFTSEVEIDHILPVSLTLDDSLANRVLCRREANREKRRQTPFQAFGATPAWNDIVARAAKLPPNKRWRFDPAALERFEREGGFLGRQLNETKYLSRLAKIYLGKICDPDRVYVTPGTLTGLLRARWGLNSILSDSNFKNRSDHRHHAVDAVVIGVLTRGMIQRIAHDAARAEDQDLDRVFRDVPVPFEDFRDHVRERVSTITVAVKPEHGKGGALHEDTSYGLVPDTDPNAALGNLVVRKPIRSLTAGEVDRVRDRALRARLGALAAPFRDESGRVRDAKGLAQALEAFGAENGIRRVRILKPDASVVTIADRRTGVPYRAVAPGENHHVDIVQMRDGSWRGFAASVFEVNRPGWRPEWEVKKLGGKLVMRLHKGDMVELSDKDGQRRVKVVQQIEISANRVRLSPHNDGGKLQDRHADADDPFRWDLATIPLLKDRGCVAVRVDPIGVVTLRRSNV

SEQ ID NO: 1158 - protein, 1405 aa, Riemerella anatipestifer
MKTILGLDLGTNSIGWALVKEAENSNEKSEIIKLGVRVNPLTVDEKTNFEAGRPLSTNADRTAKRSARRNLQRYKLRRKNLIDLLIKNQLIDKDTPLTEIGKNTTHQTLELRAKAARERIELEDLARVFLAINKKRGYRSSRKVNNEEEGQAVDGMAVAKKLYDENLTPGQYAYELLSKGKKYVPDFYRSDLQAEFNAIWEYQKQFYADILDDELYNALKGQGQQNSRKRFLAIKGVYTAENKGKRDDVKLRHYKWRSEAISKKINIEEVAYVLVEINNDLNKSSGYLGAISDRSKELYFNKETVGENLWKQIQKNPHTSLKNQVFYRQDYLDEFEQIWETQAQFHPQLTLALKEQIRDVIIFYQRKLKSQKGLLSFCQFESWEIERKDENGNVILNKTTQLPKRQTVGRRVAPKSSPLFQEFKIWQNINNLEVTKISEGASKNKKETETLSDDERKLLFEELNLRGNLSQKEVLQILGLKDKEYKTNFSEGLEGNRTNAALFNIYQQIAENEGYGFDWSKKSAQEIKEELKAVFPQIGIQADILDFNANLDGKEFENQASYQLWHLLYSAEEDDKINEEDQIIYGNSAVSLKKKLCEKFGFTPEYAKWIANVSLQDDYGNLSTKAMRKIIPYLIDGNDYSEACALAGYNHSNSLTKEENDNRELLDKLELLPKNSLRNPVVEKILNQMVNVVNQVIETYGKPDEVRIELARELKKSAEKRAEMTKSINEATRRNEDIKKLITKDFGIPNPTKSDVVRYRLWEELAPLAYKDVFTGKQIKKEDLFSSKIDIEHIIPKALLFDDSFSNKTLVFRETNLKKADRTAYDFIESDYNATLDDYIQRVETLYNNTKGTISKGKRNKLLMAQKNLPDGFIERDLRNSQYIAKKAKAMLYQVFKDVNVTSGSITDRLREDWDLINVMKELNFPKYKALGLTEIEERYDIGQEKTKRVEVITDWTKRNDHRHHAMNALTVAFTTSSHIQYLNYLNARKNESHKEHKNIKGIENKITHKQKDKRKFIPPMPNFREEAKKHIETILVSIKNKNKVYTKNINKTKKKSGHNTKEQLTPRGQLHKETVYGKSKRPMSKPTKINKNFSLEQAQLIINVQEKELVLRHLAQFDNNPAVAFDTKTLKKMPLLKNGEPLKEVLCFEEIFTIRKDITPDLKIEKVVDEKIKAILEQRKKDFGGNAKEAFSDLDKNPIWLNKKKGICIKRVTITGVSNAEALHHQKDHLGREILDDNGNPIPADFVSTGNNHHLAVYLDSEGKLQDNIVSFYEAVVRTSQGLPVVDKGLNKDLGWKFLFSLKQNEMFVFPNDDFDINDFDLLDDKKAELISKHLYRVQKISKVSAGNSFVRDIVFRHHLETTVKEVKELKDISYIQLKSLEGLRNIKKVRINHIGKIVQVGEY

SEQ ID NO: 1159 - protein, 1145 aa, Riemerella anatipestifer
MKTILGLDLGTNSIGWALVKETENSNEKSEIIKLGVRVNPLTVDEKTNFEAGRPLSTNADRTAKRSARRNLQRYKLRRKNLIDLLIKHRLIDKDTPLTEIGKNTTHQTLELRAKAARERIELEDLARVFLAINKKRGYRSSRKVNNEEEGQVVDGMAVAKKLYDENLTPGQYAYELLSKGKKYVPDFYRSDLQAEFDSIWEYQKQFYADILDDELYNALKGQGQQNSRKRFLAIKGVYTAENKGKRDEVKLQHYKWRSEAITQKLSIEEVAYVLVEINNDLNKSSGYLGAISDRSKELYFNKETVGENLWKQIQKNPHTSLKNQVFYRQDYLDEFEQIWETQAQFHPQLTLALKEQIRDVVIFYQRKLKSQKGLLSFCQFESWEIERKDENGNVILNKTTQLPKRQTVGRRVAPKSSPLFQEFKIWQNINNLEIAKISDGNSKNKKETEALSDDERKLLFEELNLRGNLSQKEVLQILGLKDKEYKTNFPEGLEGNRTNAALFNIYQQIAENEGYGDWTKKSAQEIKEELKAVFPQIGIQADILDFNAELDGKEFENQASYQLWHLLYSAEEDDKINEEDQIIYGNSAVSLKKKLCEKFGFTPEYAKWIANVSLQDDYGNLSTKAMRKIIPYLIDGNDYSEACALAGYNHSNSLTKEENDNRERLNKLELLPKNSLRNPVVEKILNQMVNVVNQVIETYGKPDEVRIELARELKKSAEERAEMTKGINEATRRNEDIKKLITKNFGIPNPTKNDVVRYRLWEELAPLAYKDVFTGRQIKKEDLFSSKIDIEHIIPKALLFDDSFSNKTLAFRETNLKKADRTAYGFIESDYNATLDDYIQRVETLYNNAKGTISKGKRNKLLMAQKNLPDGFIERDLRNSQYIAKKAKSMIEKVFNDVNVTSGSITDRLREDWDLINVMKELNFPKYKALGLTEIEERYDIGQEKTKKVEVITDWTKRNDHRHHAMDALTVAFTTKSHVQYLNNLNTIHSLKGDEVDLELSKLYGLKNTITEVVNKKRKFIPPMPNFREEAKKHIETILVSIKNKNKVYTKNINKTKKESGYHTKEQLTPRGQLHKETVYGKSKRPMNKPTKINKNFSLEQAQLIINVQEKELVLRHLAQFDNNPAVAFDTKTLKKCHYLKMVNL

SEQ ID NO: 1160 - protein, 1400 aa, Riemerella anatipestifer
MKTILGLDLGTNSIGWALVKETENSNEKSEIIKLGVRVNPLTVDEKTNFEAGRPLSTNADRTAKRSARRNLQRYKLRRKNLIDLLIKHRLIDKDTPLTEIGKNTTHQTLELRAKAARERIELEDLARVFLAINKKRGYRSSRKVNNEEEGQVVDGMAVAKKLYDENLTPGQYAYELLSKGKKYVPDFYRSDLQAEFDSIWEYQKQFYADILDDELYNALKGQGQQNSRKRFLAIKGVYTAENKGKRDEVKLQHYKWRSEAITQKLSIEEVAYVLVEINNDLNKSSGYLGAISDRSKELYFNKETVGENLWKQIQKNPHTSLKNQVFYRQDYLDEFEQIWETQAQFHPQLTLALKEQIRDVVIFYQRKLKSQKGLLSFCQFESWEIERKDENGNVILNKTTQLPKRQTVGRRVAPKSSPLFQEFKIWQNINNLEIAKISDGNSKNKKETEALSDDERKLLFEELNLRGNLSQKEVLQILGLKDKEYKTNFPEGLEGNRTNAALFNIYQQIAENEGYGDWTKKSAQEIKEELKAVFPQIGIQADILDFNAELDGKEFENQASYQLWHLLYSAEEDDKINEEDQIIYGNSAVSLKKKLCEKFGFTPEYAKWIANVSLQDDYGNLSTKAMRKIIPYLIDGNDYSEACALAGYNHSNSLTKEENDNRERLNKLELLPKNSLRNPVVEKILNQMVNVVNQVIETYGKPDEVRIELARELKKSAEERAEMTKGINEATRRNEDIKKLITKNFGIPNPTKNDVVRYRLWEELAPLAYKDVFTGRQIKKEDLFSSKIDIEHIIPKALLFDDSFSNKTLAFRETNLKKADRTAYGFIESDYNATLDDYIQRVETLYNNAKGTISKGKRNKLLMAQKNLPDGFIERDLRNSQYIAKKAKSMIEKVFNDVNVTSGSITDRLREDWDLINVMKELNFPKYKALGLTEIEERYDIGQEKTKKVEVITDWTKRNDHRHHAMDALTVAFTTKSHVQYLNNLNTIHSLKGDEVDLELSKLYGLKNTITEVVNKKRKFIPPMPNFREEAKKHIETILVSIKNKNKVYTKNINKTKKESGYHTKEQLTPRGQLHKETVYGKSKRPMNKPTKINKNFSLEQAQLIINVQEKELVLRHLAQFDNNPAVAFDTKTLKKMPLLKNGEPLKEVLCFEEIFTIRKDITPDLKIEKVVDEKIKAILEQRKKDFGGNAKEAFSDLDKNPIWLNKEKGICIKRVTITGVSNAEALHHQKDHLGREILDDNGNPIPADFVSTGNNHHVAIYEDEKGKLQEKVVSLYEAVARANQGLPVVDKGLNEDLGWKFLFTMKQNEMFVFPNDDFDVNDIDLLDENNAKIISQHLFRVQKLATKNYMFRHHLETNVQEVKELNDIAYKSIRSTEPLKNIKKVRINHIGKIVQVGEY

SEQ ID NO: 1161 - protein, 1128 aa, Roseburia intestinalis
MDEKMDYRIGLDIGIASVGWAVLQNNSDDEPVRIVDLGVRIFDTAEIPKTGESLAGPRRAARTTRRRLRRRKHRLDRIKWLFENQGLINIDDFLKRYNMAGLPDVYQLRYEALDRKLTDEELAQVLLHIAKHRGFRSTRKAETAAKENGAVLKATDENQKRMQEKGYRTVGEMIYLDEAFRIGCSWSEKGYILTPRNKAENYQHTMLRAMLVEEVKEIFSSQRRLGNKKATEELEEKYLEIMTSQRSFDLGPGMQPDGKPSPYAMEGFSDRVGKCTFLGDQGELRGAKGTYTAEYFVALQKINHTKLVNQDGETRNFTEEERRALTLLLFTQKEVKYAAVRKKLGLPEDILFYNLNYKKAATKEEQQKENQNTEKAKFIGMPYYHDYKKCLEERVKYLTENEVRDLFDEIGMILTCYKNDDSRTERLAKLGLVPIEMEGLLAYTPTKFQHLSMKAMRNIIPFLEKGMTYDKACEEAGYDFKADSKGTKQKLLTGENVNQTINEITNPVVKRSVSQTVKVINAIIRTYGSPQAINIELAREMSKTFEERRKIKGDMEKRQKNNEDVKKQIQELGKLSPTGQDILKYRLWQEQQGICMYSGKTIPLEELFKPGYDIDHILPYSITFDDSFRNKVLVTSQENRQKGNRTPYEYMGNDEQRWNEFETRVKTTIRDYKKQQKLLKKHFSEEERSEFKERNLTDTKYITTVIYNMIRQNLEMAPLNRPEKKKQVRAVNGAITAYLRKRWGLPQKNRETDTHHAMDAVVIACCTDGMIQKISRYTKVRERCYSKGTEFVDAETGEIFRPEDYSRAEWDEIFGVHIPKPWETFRAELDVRMGDDPKGFLDTHSDVALELDYPEYIYENLRPIFVSRMPNHKVTGAAHADTIRSPRHFKDEGIVLTKTALTDLKLDKDGEIDGYYNPQSDLLLYEALKKQLLLYGNDAKKAFAQDFHKPKADGTEGPVVRKVKIQKKQTMGVFVDSGNGIAENGGMVRIDVFRVNGKYYFVPVYTADVVKKVLPNRASTANKPYSEWRTMEDKDFLFSLYSRDLVHIKSKKGIPIKNVDGSLGESKEVYAYYIGADISGAKIEGKAHDSRYTFRGIGVQKLELIEKCQVDILGHISTVKNEKRMGFS

SEQ ID NO: 1162 - protein, 1471 aa, Scardovia wiggsiae
MGYKAPRNDKGEIDYGVGLDLGNGSVGWVAMDKDYHLIRARGHELIGARLFDPANSAENRRESRTTRRRLSRRRWRLRMLDSLFASELAKIDPNFLARRKYSWVHPKDEQNHENWYGSIIFGSKEQDKQFYKDYPTIYHLRKKLTEDTERHDIREIYVAIHHIVKYRGHFLREGEINSENLFDPEGFVELIKDVIKLNNSYDESTPIFEASPADVSEALLNEHTSRSGRIEDTLDKLDFSVSRVDKHELKGMRDAAKAVIGAIVGNTADFSKIFNLDNLDKDSKDNLKLKFADSNFDEKYGGVVGSGLLDETQIELVDRIHAVYDAVALKGILGDAHTISEAKVESYEKHRKNWKLIKEELRTKENKDEVDLWYGDLSGRQYKNPPDPEKGPDEGSKKDSPIRDSDQKQNLIKKANDYFTELIDDSQLSEEQKNCLKNDINNGQLFPVQRSSDNGVIPYQIHLNELRRIIENQKQYYPFLAETFIRKTAEGKSYEENKIVALLKFRVPYYVGPLVSKEDMEEHSSGNSAYHWMARNPGRGEAITPWNFDEVVDKDESGARFISRLTGTDTYLLGEPTLPQHSLLYEEYMVLSELNNVRLNVRQGNHWSDKNRQRLSYKQKEFLIENLFKEHKTVTRKRAEDCLSSMGCGEVQLFGLSDEKKFASSLSSYITLKKILGKAFVDDSGNSAILERIIEVQTVFEDREPLTHQLSLIDSLTVEQRKQLAKIHYTGWGKLSRKLLTSKKGSYKIHSQNEIMRTQHSIIDIMRGDSLNLIEIIRDKKIGIGEWIDNENLDRETGESDVSRLESVFEGIVMSPRVKRGVVQAVRVIDDLAKAIGNPPQRIFIEMADEVQASQRTVSRLSRLKALYGSPSLQKEFNDLKDLRKSLNETKDADLQEDRLYLYYIQLGKDLYTGKEISIDSLSSAYDIDHIVPQALTQDDSIDNRVLVSRKENARKTDSYLYTPDLIKNMRPLWGKLLAAGLMSQKKYDALTRVDDFKDREKQRFVQRSLVETRQIMKNVSTILRTYYGEDTNVVTLKSSITHDMRKYLGFPYKNRDINDYHHAQDALCISAAGQFMLNRHFVSGGEVTDGASNAYNMYLAEYLQEFRDAKARGERKRSTAFGFVVGSMSSKDDEKRTDHRTGEIVWSETNAEYLRKVMNYKKMLITQKVGDVKTRALYDETRYGHKESSAKSIKFDNLRRDTSLYGGFSGASTAYMMLVEYKKKNKLVSITAQEASLLAVADQKNDTVSVMDGILASHGLSGAKILLPKIVTGQLLDYSDALVTLQSASELNTARQMWLPRNDYNDIDIILKSKDIEDAAHKLGYDSDTVHVLRRIQKLFEAVFRVAESQFPLHQLSKDQQEEILRDPQNYGFGSAVKLLGGLLKALHANAENTNLAGLVKVLHGDKEYSDDGKAKEFKKFGFSPRWRRISNPTGFTLSDSDTFIYQSPSGIFEQRVTVKELKEKADKQK

SEQ ID NO: 1163 - protein, 116 aa, Sphingobacterium spiritivorum
MFRKYFEEKNSARLLFTLKQGDFVYVPDDNEEVILDESSPLFIDYWKNISERSNNIHVVQKFSGKEIYFLKHTIADTIAKKIEFGSQDCYQSLNGKSIKEFCIKIDSDRLGNISKV

SEQ ID NO: 1164 - protein, 1306 aa, Sphingobacterium spiritivorum; identical to SEQ ID NO: 93

SEQ ID NO: 1165 - protein, 1110 aa, Sphingobium sp.
MAEGKKRIWRLGADLGANSLGWAAIELSAPVNGKPIAILAAGSRIFSDGRDPKSGASLAVDRRDARAMRRRRDRFKQRQKALIKYLIADGLFPADEAARNAMAAIDPYAVRARALDEALSLPELGRALFHLNQRRGFKSNRKADRKADDDAGKIAIGIDRTRDAIAEDEADAGAEPGSWTFGKWLHERRLKGQSVRTRLRPESGEDAKGDGYDFYPDRALMEEEFDAIWAAQAPHHPDVLTNDVHDRLHEIIFYQRPLKAPQVGMCSLIPGDRRLPKAHPLFQRRRLLEELNALMIVRPGEVAQRLTREERDILLLKLKDKNKVSFATLRKALKLDPDARFNKESEDRTDLKGDEVAAVMGSKTRFGNLWVHLSIEAQWDVLARLDAVESDAEDAAFCAWLVETYALTPEQARAVANAPLPPGYGRFGETATRKLIEALRDGKKDDRVLVYSEAVTEAGLGHHSDRRTGEVFEDAKGRPQLPYYGVALERHIMPGTGDPSDPEEMRVGRLTNPTVHIGLNQLRRILNVLIRAYGPPAEIAIELARELKLTDEDKKRINRENNDNRIAAERRSEKLLAIGQADSGANRALLKLWEELNPANVLDRRCIYSGRQISIDMLFSAAVEVDHILPFAATLDDSNGNKIVCLREANREKRKRSPHDAWGHSARWDEIAARAAQLPRNKRWRFEPDAMDKFRDEGGFQARHLVDTQYLARLSREYLATLYPEKGEGSGHIWVSPGRLTEMVRRKLGLNDLLPDHNFGGGADQAKNRLDHRHHAIDAVVVAIVDRGMLNAIARASGQEGAEGRERIIIPEPWDGFRDALRETVNRITVSHRTDHGTASKAGLPKGKDATAGRLHNDTAYGFTGDTDAKGNSIVVRRVPLSSFKKLADLDRIRDADLKAALYQHLNGLEGKAFEKALAEFHKLEWHNFGGVRRVRVTEPLTVIPIKDRNGRIYKGYKGDSNYRYDVWELPDGKWVTNWKNEAGEAMSSVISMFDAHQSSEPPRPHPAARKILSLHQNDLLAIEREGEDRKLMRVVKFGQSGQITLAEHQQAGDLKKRDAVSNDDDPFKYFAPTSGGLKKVKARQVRIDEIGRVLDPGFPARTARRKTRG

SEQ ID NO: 1166 - protein, 1084 aa, Sporolactobacillus vineae
MKYSIGLDIGISSVGWSVINLDRERIELMGARLFDAAENPKNGSSLAAPRRDARSARRRLRRRRYRVGRVRHFIIDRGLVTRGQADQLFDWKDGDLDIWLVRVNALERLLTDREFARVLIHIAKNRGYRSNRKSEAKSGENGQVLSAIKANKELMEEKGYQTVAEMLVNEPETFAGRKRNRGGEYTHVIARSELEHEIRLIFTKQRAFGNRFATEENENTYVKIWAAQRPVATKDDILKKIGDCTFEKGEKRAPKASYAFQYFRALDKLNRLRILSVREPSRNLTDDERNLIVPALFNHDKQKYSDLRKILQLRDDQKFNELFYDPGKSLKENENKTFLSLAEQYKIRKVIRDVQGKDGLLQYRPLDIDTIAYALTVFKDDQDTRDYLSNTFVNGNGKQVLNLANRAFDAELIDGLLSLSFAKFGHLSLKALHKLIPHMEQGLSYYDACKKVGYHDNEQVGKSKQHLLPVIPADEIRNPVVVRSLSQTRKVINAIIKRYGSPTFMYIELAREMGRPYNERRDLEKQYNKNRTVNDSAIEQIHELYPEIGAPRGHDILKYKLWQQQDCKCAYSLEKIPAEKIFEPGYAEVDHIIPYSRSFDDSNSNKVLVLSRMNQEKKNRTPYEWFGGDEHRWNKFESYVNALKVNRKKKSLLTKKNMDTEEEDTFKSRHLNDTRYITRFIKSFVEDNLLFREIEGAKQHVFTVNGAYTSLMRKRWGFNKNREESDLHHSVDAVIIAVSQPFRNEVSRYFKHREISLPQLLKRTWDYFPEPWEGFVKELRARTLQDPEKLKLALESLDLDSYDPEFIDEVKPIFISRMPKRSIKGQIHDETLRRNRGKTKDGFVKIVTRTRLENIKFDKNGDFPMYGRESDPKTYQAIKQRYLENNKDKKKAFIEPLYKPAKNPNNASLIRSVKIEDKANQIVPLRDEAVAYNASIVRTEVYRNKETGKFYLAPVYVSDVFAGREPRRFIRANVPYEQWVNITDKFTFLFNLYPNDVIYIKMKKVKTTKSNINKTISWQESYFYFKGTDIHTGAITIIDHMNSFTDRVGTQGLQLFEKYQVDPLGNLSRVHGETQYGVPALSHS

SEQ ID NO: 1167 - protein, 475 aa, Staphylococcus massiliensis
MGQDYILGLDIGITSVGYGLIDYHDKSVIDAGVRLFKEANVENNEGRRSKRGSRRLQRRRKHRLARTRNLLESYQLNPFPKCEKNPYEIRVKGFKEVLTSDELSAALLHLAKRRGIDNVHVTDTESDSSDNGLSTKEQLAKNQKALESRYVCELQLERLLNDNKVRGANNRFKTQDFVREAKQILSIQKDHHNLDQVFIDKYISLLETRREYYEGPGKGSPYGWDGDIKKWYELLMGRCTYFPESLRSVKYAYSADLFNALNDLNNLVIVRDENDKLTYPEKYHIVENVFKQRKKPTLKQIAKEIDVAPEDIRGYRVTASGTPVFTSFKLYHDIKSVTSNDKVLEDTELLDAIAEVLTIYQSPIEVQEKLESLNVILTKEEIEGISKLTGYTGTHALSLKAIQIVIDELWETNDNQMTIFTRLNMKPQKVDLAKANKIPTSLVEDFIISPVAKRAFIQSIKVINAVIKNMVCLKI

SEQ ID NO: 1168 - protein, 581 aa, Staphylococcus massiliensis
MPKDIIIELAREKNSDEERKIIRDVQKRNQQTRDLVDKVIKETGKTKAKGMVEKLILHDKQEGKCLYSLKSIPLEDLLNNPHHYEVDHIIPRSVSYDNSMNNKVLVLQEENSKKSNQTPFQYFNSSNTHITFKQFKQHVLNLSKTKDRITKKKKEYLLEERDINKFSVQKEFINRNLVDTRYATRELMTLLRAYFSANELDVKVKAINGGFTSYLRKRWDFKKDRNAGYKHHAEDALIIANVDFIFKQLKALDNAKKVMEGRKVQVEKDNVEDNEHYESLFREPDQIKEIKLYDNYKFSHRVDKKPNRELINDTIYSTRKVDNKTYTIQTVNNIYDKQNDQLKKLFNKSPEKFLMYKHDPKTFDKLATIMRQYKNEKNPLYKFHDETGEYLTKYAKKDNGPIVKSLKYIGKQVNAHLDITNDYENSNNKVVKLSLKPFRFDVYLDDGKYKFVTVKYLDIIKKDTYYVIDEEKYKLALQQKKISENAKFIGSFYNNDLIKINGELLRVIGVNDDAKNTLELNMIDISYRDYVENMNLATTPRIRKNIGKSITILEKYTTDILGNTFKISSPEKPQFIFKVRD

SEQ ID NO: 1169 - protein, 1334 aa, Staphylococcus pseudintermedius; identical to SEQ ID NO: 200

SEQ ID NO: 1170 - protein, 1112 aa, Staphylococcus simulans; identical to SEQ ID NO: 247

SEQ ID NO: 1171 - protein, 773 aa, Streptococcus agalactiae
MNKPYSIGLDIGTNSVGWSIITDDYKVPAKKMRVLGNTDKEYIKKNLIGALLFDGGNTAADRRLKRTARRRYTRRRNRILYLQEIFAEEMSKVDDSFFHRLEDSFLVEEDKRGSKYPIFATLQEEKDYHEKFSTIYHLRKELADKKEKADLRLIYIALAHIIKFRGHFLIEDDSFDVRNTDISKQYQDFLEIFNTTFENNDLLSQNVDVEAILTDKISKSAKKDRILAQYPNQKSTGIFAEFLKLIVGNQADFKKYFNLEDKTPLQFAKDSYDEDLENLLGQIGDEFADLFSAAKKLYDSVLLSGILTVIDLSTKAPLSASMIQRYDEHREDLKQLKQFVKASLPEKYQEIFADSSKDGYAGYIEGKTNQEAFYKYLSKLLTKQEDSENFLEKIKNEDFLRKQRTFDNGSIPHQVHLTELKAIIRRQSEYYPFLKENQDRIEKILTFRIPYYIGPLAREKSDFAWMTRKTDDSIRPWNFEDLVDKEKSAEAFIHRMTNNDFYLPEEKVLPKHSLIYEKFTVYNELTKVRYKNEQGETYFFDSNIKQEIFDGVFKEHRKVSKKKLLDFLAKEYEEFRIVDVIGLDKENKAFNASLGTYHDLEKILDKDFLDNPDNESILEDIVQTLTLFEDREMIKKRLENYKDLFTESQLKKLYRRHYTGWGRLSAKLINGIRDKESQKTILDYLIDDGRSNRNFMQLINDDGLSFKSIISKAQAGSHSDNLKEVVGELAGSPAIKKGILQSLKIVDELVKVMGYEPEQIVVEMARENQTTNQ

SEQ ID NO: 1172 - protein, 1370 aa, Streptococcus agalactiae
MNKPYSIGLDIGTNSVGWSIITDDYKVPAKKMRVLGNTDKEYIKKNLIGALLFDGGNTAADRRLKRTARRRYTRRRNRILYLQEIFAEEMSKVDDSFFHRLEDSFLVEEDKRGSKYPIFATMQEEKDYHEKFPTIYHLRKELADKKEKADLRLVYLALAHIIKFRGHFLIEDDRFDVRNTDIQKQYQAFLEIFDTSFENNHLLSQNVDVEAILTDKISKSAKKDRILAQYPNQKSTGIFAEFLKLIVGNQADFKKHFNLEDKTPLQFAKDSYDEDLENLLGQIGDEFADLFSAAKKLYDSVLLSGILTVTDLSTKAPLSASMIQRYDEHREDLKQLKQFVKASLPEKYQEIFADSSKDGYAGYIEGKTNQEAFYKYLSKLLTKQEDSEYFLEKIKNEDFLRKQRTFDNGSIPHQVHLTELKAIIRRQSEYYPFLKENQDKIEKILTFRIPYYVGPLARGNSDFAWMTRKTDDSIRPWNFEDLVDKEKSAEAFIHRMTNNDLYLPEEKVLPKHSLIYEKFTVYNELTKVRYKNEQGETYFFDSNVKQEIFDGVFKEHRKVSKKQLLDFLAKEFEEFRIVDVTGLDKENKAFNASLGTYHDLKKILDKDFLDNPDNESILEDIVQTITLFEDREMIKKRLENYKDLFTESQLKKLYRRHYTGWGRLSAKLINGIRDRESQKTILDYLISDGRANRNFMQLINDDGLSFKSIISKAQSGSHSDNLKEVVGELAGSPAIKKGILQSLKIVDELVKVMGYEPEQIVVEMARENQTTNQGRRNSRQRYKLLEDGVKNLASDLNGDILKEYPTDNQALQNERLFLYYLQNGRDMYTGEALDIDNLSQYDIDHIVPQAFIKDDSIDNRVLVSSAKNRGKSDDVPSIDIVKARKAFWKKLLDAKLISQRKYDNLTKAERGGLTPDDKAGFIQRQLVETRQITKHVARILDERFNNKVDDNNKPIRKVKIVTLKSNLVSNFRKEFGFYKIREVNNYHHAHDAYLNAVVAKAILTKYPQLEPEFVYGDYPKYNSYKTRKSATEKLFFYSNIMNFFKTKVTLADETVVVKDDIEVNNETGEIAWDKKKHFATVRKVLSYPQVNIVKKTEVQTGGFSKESILAHSNSDKLIPRKTKDIYLDPKKYGGFDSPIVAYSVLVLADIKKGKAQKLKTVKELIGITIMERERFEKNPSAFLESKGYLNIRTDKLIILPKYSLFELENGRRRLLASAGELQKGNELALPTQYMKFLYLASRYNESKGKPEEIEKKQEFVNQHVSYFDDILQLINDFSKRVILADANLEKINKLYSDNKDNTPVDELAKNIINLFTFTSLGAPAAFKFFDKSVDRKRYTSTKEVLDSTLIHQSITGLYETRIDLGKLGED

SEQ ID NO: 1173 - protein, 1370 aa, Streptococcus agalactiae
MNKPYSIGLDIGTNSVGWSIITDDYKVPAKKMRVLGNTDKEYIKKNLIGALLFDGGNTAADRRLKRTARRRYTRRRNRILYLQEIFAEEMSKVDDSFFHRLEDSFLVEEDKRGSKYPIFATMQEEKDYHEKFPTIYHLRKELADKKEKADLRLVYLALAHIIKFRGHFLIEDDRFDVRNTDIQKQYQAFLEIFDTSFENNHLLSQNVDVEAILTDKISKSAKKDRILAQYPNQKSTGIFAEFLKLIVGNQADFKKHFNLEDKTPLQFAKDSYDEDLENLLGQIGDEFADLFSAAKKLYDSVLLSGILTVTDLSTKAPLSAYMIQRYDEHREDLKQLKQFVKASLPEKYQEIFADSSKDGYAGYIEGKTNQEAFYKYLSKLLTKQEDSEYFLEKIKNEDFLRKQRTFDNGSIPHQVHLTELKAIIRRQSEYYPFLKENQDKIEKILTFRIPYYVGPLARGNSDFAWMTRKTDDSIRPWNFEDLVDKEKSAEAFIHRMTNNDLYLPEEKVLPKHSLIYEKFTVYNELTKVRYKNEQGETYFFDSNVKQEIFDGVFKEHRKVSKKQLLDFLAKEFEEFRIVDVTGLDKENKAFNASLGTYHDLKKILDKDFLDNPDNESILEDIVQTITLFEDREMIKKRLENYKDLFTESQLKKLYRRHYTGWGRLSAKLINGIRDRESQKTILDYLISDGRANRNFMQLINDDGLSFKSIISKAQSGSHSDNLKEVVGELAGSPAIKKGILQSLKIVDELVKVMGYEPEQIVVEMARENQTTNQGRRNSRQRYKLLEDGVKNLASDLNGDILKEYPTDNQALQNERLFLYYLQNGRDMYTGEALDIDNLSQYDIDHIVPQAFIKDDSIDNRVLVSSAKNRGKSDDVPSIDIVKARKAFWKKLLDAKLISQRKYDNLTKAERGGLTPDDKAGFIQRQLVETRQITKHVARILDERFNNKVDDNNKPIRKVKIVTLKSNLVSNFRKEFGFYKIREVNNYHHAHDAYLNAVVAKAILTKYPQLEPEFVYGDYPKYNSYKTRKSATEKLFFYSNIMNFFKTKVTLADETVVVKDDIEVNNETGEIAWDKKKHFATVRKVLSYPQVNIVKKTEVQTGGFSKESILAHSNSDKLIPRKTKDIYLDPKKYGGFDSPIVAYSVLVLADIKKGKAQKLKTVKELIGITIMERERFEKNPSAFLESKGYLNIRTDKLIILPKYSLFELENGRRRLLASAGELQKGNELALPTQYMKFLYLASRYNESKGKPEEIEKKQEFVNQHISYFDDILQLINDFSKRVILADANLEKINKLYSDNKDNTPVDELAKNIINLFTFTSLGAPAAFKFFDKSVDRKRYTSTKEVLDSTLIHQSITGLYETRIDLGKLGED

SEQ ID NO: 1174 - protein, 1378 aa, Streptococcus agalactiae
MNKPYSIGLDIGTNSVGWSIITDDYKVPAKKMRVLGNTDKEYIKKNLIGALLFDGGNTAADRRLKRTARRRYTRRRNRILYLQEIFAEEMSKVDDSFFHRLEDSFLVEEDKRGSKYPIFATMQEEKYYHEKFPTIYHLRKELADKKEKADLRLIYLALAHIIKFRGHFLIEDDRFDVRNTDIQKQYQAFLEIFDTTFENNDLLSQNVDVEAILTDKISKSAKKDRILARYPNQKSTGIFAEFLKLIVGNQADFKKHFNLEDKTPLQFAKDSYDEDLENLLGQIGDEFADLFSAAKKLYDSVLLSGILTVIDLSTKAPLSASMIQRYDEHHEDLKHLKQFVKASLPENYREVFADSSKDGYAGYIEGKTSQEAFYKYLLKLLTKQEGSEYLLEKIKNEDFLRKQRTFDNGSIPHQVHLTELRAIIRRQSEYYPFLKENLDRIEKILTFRIPYYVGPLAREKSDFAWMTRKTDDSIRPWNFEDLVDKEKSAEAFIHRMTNNDLYLPEEKVLPKHSLIYEKFTVYNELTKVRFLAEGFKDFQFLNRKQKETIFNSLFKEKRKVTEKDIISFLNKVDGYEGIAIKGIEKQFNASLSTYHDLKKILGKDFLDNTDNELILEDIIQTLTLFEDREMIKKRLDIYKDFFTESQLKKLYRRHYTGWGRLSAKLINGIRNKENQKTILDYLIDDGSANRNFMQLIKDAGLSFKPIIDKARTGSHSDNLKEVVGELAGSPAIKKGILQSLKIVDELVKVMGYEPEQIVVEMARENQTTAKGLSRSRQRLTTLRESLGNLKSNILEEKKPKYVKDQVENHHLSDDRLFLYYLQNGKDMYTDDELDIDNLSQYDIDHIIPQAFIKDDSIDNRVLVSSAKNRGKSDDVPSIEIVKARKMFWKNLLDAKLMSQRKYDNLTKAERGGLTSDDKARFIQRQLVETRQITKHVARILDERFNNELDSKGRRIRKVKIVTLKSNLVSNFRKEFGFYKIREVNNYHHAHDAYLNAVVAKAILTKYPQLEPEFVYGLYRRKKLSKIVREDKEEKYSEATRKMFFYSNLMNMFKRVVRLADGSIVVRPVIETGRYMGKTAWDKKKHFATVRKVLSYPQNNIVKKTEIQTGGFSKESILAHGNSDKLIPRKTKDIYLDPKKYGGFDSPIVAYSVLVVADIKKGKAQKLKTVTELLGITIMERSRFEKNTSAFLESKGYLNIRDDKLMILPKYSLFELENGRRRLLASAGELQKGNELALPTQFMKFLYLASRYNESKGKPEEIEKKQEFVNQHVSYFDDILQLINDFSNRVILADANLEKINKLYQDNKENIPVDELANNIINLFTFTSLGAPAAFKFFDKIVDRKRYTSTKEVLNSTLIHQSITGLYETRIDLGKLGEG

SEQ ID NO: 1175 - protein, 1370 aa, Streptococcus agalactiae
MNKPYSIGLDIGTNSVGWSIITDDYKVPAKKMRVLGNTDKEYIKKNLIGALLFDGGNTAADRRLKRTARRRYTRRRNRILYLQEIFAEEMSKVDDSFFHRLEDSFLVEEDKRGSKYPIFATMQEEKYYHEKFPTIYHLRKELADKKEKADLRLIYLALAHIIKFRGHFLIEDDRFDVRNTDIQKQYQAFLEIFDTTFENNDLLSQNVDVEAILTDKISKSAKKDRILARYPNQKSTGIFAEFLKLIVGNQADFKKHFNLEDKTPLQFAKDSYDEDLENLLGQIGDEFADLFSAAKKLYDSVLLSGILTVTDLSTKAPLSASMIQRYDEHREDLKQLKQFVKASLPEKYQEIFADSSKDGYAGYIEGKTNQEAFYKYLSKLLTKQEGSEYLLEKIKNEDFLRKQRTFDNGSIPHQVHLTELRAIIRRQSEYYPFLKENLDRIEKILTFRIPYYVGPLAREKSDFAWMTRKTDDSIRPWNFEDLVDKEKSAEAFIHRMTNNDLYLPEEKVLPKHSLIYEKFTVYNELTKVRFLAEGFKDFQFLNRKQKETIFNSLFKEKRKVTEKDIISFLNKVDGYEGIAIKGIEKQFNASLSTYHDLKKILGKDFLDNTDNELILEDIVQTLTLFEDREMIRKRLDIYKDFFTESQLKKLYRRHYTGWGRLSAKLINGIRNKENQKTILDYLIDDGSANRNFMQLIKDAGLSFKPIIDKARTGSHSDNLKEVVGELAGSPAIKKGILQSLKIVDELVKVMGYEPEQIVVEMARENQTTAKGLSRLRQRLTTLRESLANLKSNILEEKKPKYVKDQVENHHLSDDRLFLYYLQNGKDMYTDDELDIDNLSQYDIDHIIPQAFIKDDSIDNRVLVSSAKNRGKSDDVPSVEIVKDCKVFWKKLLDAKLMSQRKYDNLTKAERGGLTSDDKARFIQRQLVETRQITKHVARILDERFNNELDSKGRRIRKVKIVTLKSNLVSNFRKEFGFYKIREVNNYHHAHDAYLNAVVAKAILTKYPQLEPEFVYGDYPKYNSYKTRKSATEKLFFYSNIMNFFKTKVTLADGTVVVKDDIEVNNDTGEIVWDKKKHFATVRKVLSYPQVNIVKKTEIQTGGFSKESILAHGNSDKLIPRKTKDIYLDPKKYGGFDSPIVAYSVLVVADIKKGKAQKLKTVTELLGITIMERSRFEKNPSAFLESKGYLNIRDDKLMILPKYSLFELENGRRRLLASADELQKGNELALPTQFMKFLYLASRYNELKGKPEEIEQKQEFVVQHVSYFDDILQIINDFSNRVILADANLEKINKLYQDNKENIPVDELANNIINLFTFTSLGAPAAFKFFDKIVDRKRYTSTKEVLNSTLIHQSITGLYETRIDLGKLGED

SEQ ID NO: 1176 - protein, 1377 aa, Streptococcus agalactiae
MNKPYSIGLDIGTNSVGWSIITDDYKVPAKKMRVLGNTDKEYIKKNLIGALLFDGGNTAADRRLKRTARRRYTRRRNRILYLQEIFAEEMSKVDDSFFHRLEDSFLVEEDKRGSKYPIFATMQEEKYYHEKFPTIYHLRKELADKKEKADLRLVYLALAHIIKFRGHFLIEDDRFDVRNTDIQKQYQAFLEIFDTTFENNHLLSQNVDVEAILTDKISKSAKKDRILAQYPNQKSTGIFAEFLKLIVGNQADFKKHFNLEDKTPLQFAKDSYDEDLENLLGQIGDEFADLFSVAKKLYDSVLLSGILTVTDLSTKAPLSASMIQRYDEHHEDLKHLKQFVKASLPENYREVFADSSKDGYAGYIEGKTNQEAFYKYLLKLLTKQEGSEYFLEKIKNEDFLRKQRTFDNGSIPHQVHLTELRAIIRRQSEYYPFLKENQDRIEKILTFRIPYYVGPLAREKSDFAWMTRKTDDSIRPWNFEDLVDKEKSAEAFIHRMTNNDLYLPEEKVLPKHSLIYEKFTVYNELTKVRFLAEGFKDFQFLNRKQKETIFNSLFKEKRKVTEKDIISFLNKVDGYEGIAIKGIEKQFNASLSTYHDLKKILGKDFLDNTDNELILEDIVQTLTLFEDREMIKKCLDIYKDFFTESQLKKLYRRHYTGWGRLSAKLINGIRNKENQKTILDYLIDDGSANRNFMQLINDDDLSFKPIIDKARTGSHSDNLKEVVGELAGSPAIKKGILQSLKIVDELVKVMGYEPEQIVVEMARENQTTAKGLSRSRQRLTTLRESLANLKSNILEEKKPKYVKDQVENHHLSDDRLFLYYLQNGRDMYTKKALDIDNLSQYDIDHIIPQAFIKDDSIDNRVLVSSAKNRGKSDDVPSIEIVKARKMFWKNLLDAKLMSQRKYDNLTKAERGGLTSDDKARFIQRQLVETRQITKHVARILDERFNNEVDNGKKICKVKIVTLKSNLVSNFRKEFGFYKIREVNDYHHAHDAYLNAVVAKAILTKYPQLEPEFVYGMYRQKKLSKIVHEDKEEKYSEATRKMFFYSNLMNMFKRVVRLADGSIVVRPVIETGRYMGKTAWDKKKHFATVRKVLSYPQNNIVKKTEIQTGGFSKESILAHGNSDKLIPRKTKDIYLDPKKYGGFDSPIVAYSVLVVADIKKGKAQKLKTVTELLGITIMERSRFEKNPSAFLESKGYLNIRDDKLMILPKYSLFELENGRRRLLASAGELQKGNELALPTQFMKFLYLASRYNESKGKPEEIEKKQEFVNQHVSYFDDILQLINDFSKRVILADANLEKINKLYQDNKENIPVDELANNIINLFTFTSLGAPAAFKFFDKIVDRKRYTSTKEVLNSTLIHQSITGLYETRIDLGKLGED

SEQ ID NO: 1177 - protein, 1370 aa, Streptococcus agalactiae
  misc_feature (117)..(117): Xaa can be any naturally occurring amino acid
MNKPYSIGLDIGTNSVGWSIITDDYKVPAKKMRVLGNTDKEYIKKNLIGALLFDGGNTAADRRLKRTARRRYTRRRNRILYLQEIFAEEMSKVDDSFFHRLEDSFLVEEDKRGSKYXIFATLQEEKDYHEKFSTIYHLRKELADKKEKADLRLIYIALAHIIKFRGHFLIEDDSFDVRNTDISKQYQDFLEIFNTTFENNDLLSQNVDVEAILTDKISKSAKKDRILAQYPNQKSTGIFAEFLKLIVGNQADFKKYFNLEDKTPLQFAKDSYDEDLENLLGQIGDEFADLFSAAKKLYDSVLLSGILTVIDLSTKAPLSASMIQRYDEHREDLKQLKQFVKASLPEKYQEIFADSSKDGYAGYIEGKTNQEAFYKYLSKLLTKQEDSENFLEKIKNEDFLRKQRTFDNGSIPHQVHLTELKAIIRRQSEYYPFLKENQDRIEKILTFRIPYYIGPLAREKSDFAWMTRKTDDSIRPWNFEDLVDKEKSAEAFIHRMTNNDFYLPEEKVLPKHSLIYEKFTVYNELTKVRYKNEQGETYFFDSNIKQEIFDGVFKEHRKVSKKKLLDFLAKEYEEFRIVDVIGLDKENKAFNASLGTYHDLEKILDKDFLDNPDNESILEDIVQTLTLFEDREMIKKRLENYKDLFTESQLKKLYRRHYTGWGRLSAKLINGIRDKESQKTILDYLIDDGRSNRNFMQLINDDGLSFKSIISKAQAGSHSDNLKEVVGELAGSPAIKKGILQSLKIVDELVKVMGYEPEQIVVEMARENQTTNQGRRNSRQRYKLLDDGVKNLASDLNGNILKEYPTDNQALQNERLFLYYLQNGRDMYTGEALDIDNLSQYDIDHIIPQAFIKDDSIDNRVLVSSAKNRGKSDDVPSLEIVKDCKVFWKKLLDAKLMSQRKYDNLTKAERGGLTSDDKARFIQRQLVETRQITKHVARILDERFNNELDSKGRRIRKVKIVTLKSNLVSNFRKEFGFYKIREVNNYHHAHDAYLNAVVAKAILTKYPQLEPEFVYGDYPKYNSYKTRKSATEKLFFYSNIMNFFKTKVTLADGTVVVKDDIEVNNDTGEIVWDKKKHFATVRKVLSYPQNNIVKKTEIQTGGFSKESILAHGNSDKLIPRKTKDIYLDPKKYGGFDSPIVAYSVLVVADIKKGKAQKLKTVTELLGITIMERSRFEKNPSAFLESKGYLNIRADKLIILPKYSLFELENGRRRLLASAGELQKGNELALPTQFMKFLYLASRYNESKGKPEEIEKKQEFVNQHVSYFDDILQLINDFSKRVILADANLEKINKLYQDNKENISVDELANNIINLFTFTSLGAPAAFKFFDKIVDRKRYTSTKEVLNSTLIHQSITGLYETRIDLGKLGED

SEQ ID NO: 1178 - protein, 1370 aa, Streptococcus agalactiae
MNKPYSIGLDIGTNSVGYSVVTDDYKVPAKKMRVLGNTDKEYIKKNLIGALLFDGGNTASDRRLKRTARRRYTRRRNRILYLQEIFAEEMSKVDDSFFHRLEDSFLVEDDKRGSKYPIFATMQEEKDYHEKFPTIYHLRKELADKKEKADLRLVYLALAHIIKFRGHFLIEDDSFDVRNTDIQRQYQAFLEIFDTTFENNHLLSQNIDVEGILTDKISKSAKKDRILAQYPNQKSTGIFAEFLKLIVGNQADFKKHFNLEDKTPLQFAKDSYDEDLENLLGQIGDEFADLFSVAKKLYDSVLLSGILTVTDLSTKAPLSASMIQRYDEHREDLKQLKQFVKASLPEKYQEIFTDSSKDGYAGYIEGKTNQGAFYKYLSKLLTKQEGSEYFLEKIKNEDFLRKQRTFDNGSIPHQVHLTELKAIIRRQSEYYPFLKENLDRIEKILTFRIPYYVGPLAREKSDFAWMTRKTDDSIRPWNFEELVDKEASAEAFIHRMTNNDLYLPEEKVLPKHSLIYEKFTVYNELTKVRYKNEQGETYFFDSNIKQEIFDGVFKEHRKVSKKKLLDFLAKEYEEFRIVDVIGLDKENKAFNASLGTYHDLKKILDKDFLDNPDNESILEDIVQTLTLFEDREMIKKRLENYKDLFTESQLKKLYRRHYTGWGRLSAKLINGIRDKESQKTILDYLISDGRANRNFMQLIHDDGLSFKPIIDKAQAGSHSDNLKEVVGELAGSPAIKKGILQSLKIVDELVKVMGYEPEQVVVEMARENQTTNQGRRNTRQRYKLLEEGVKNLASDLNGNILKEYPTDNQALQNERLFLYYLQNGRDMYTGEALDIDNLSQYDIDHIVPQAFIKDDSIDNRVLVSSAKNRGKSDNVPSIDIVKARKAFWKKLLDAKLMSQRKYDNLTKAERGGLTSDDKARFIQRQLVETRQITKHVARILDERFNNELDSKGRRIRKVKIVTLKSNLVSNFRKEFGFYKIREVNDYHHAHDAYLNAVVAKAILTKYPQLEPEFVYGDYPKYNSYKTRKSATEKLFFYSNIMNFFKTKVTLADGTVVVKDDIEVNNDTGEIVWDKKKHFATVRKVLSYPQVNIVKKTEIQTGGFSKESILAHGNSDKLIPRKTKDIYLDPKKYGGFDSPIVAYSVLVVADIKKGKAQKLKTVTELLGITIMERFRFEKNPSAFLESKGYLNIRDDKLMILPKYSLFELENGRRRLLASAGELQKGNELALPTQYMKFLYLASRYNELKGKPEEIEQKQEFVVQHVSYFDDILQIINDFSNRVILADANLEKINKLYQDNKENISVDELANNIINLFTFTSLGAPAAFKFFDKIVDRKRYTSTKEVLNSTLIHQSITGLYETRIDLGKLGED

SEQ ID NO: 1179 - protein, 1370 aa, Streptococcus agalactiae
MNKPYSIGLDIGTNSVGYSVVTDDYKVPAKKMRVLGNTDKEYIKKNLIGALLFDGGNTASDRRLKRTARRRYTRRRNRILYLQEIFAEEMSKVDDSFFHRLEDSFLVEDDKRGSKYPIFATMQEEKDYHEKFPTIYHLRKELADKKEKANLRLVYLALAHIIKFRGHFLIEDDSFDVRNTDIQRQYQAFLEIFDTTFENNHLLSQNIDVEGILTDKISKSAKKDRILAQYPNQKSTGIFAEFLKLIVGNQADFKKHFNLEDKTPLQFAKDSYDEDLENLLGQIGDEFADLFSVAKKLYDSVLLSGILTVTDLSTKAPLSASMIQRYDEHREDLKQLKQFVKASLPEKYQEIFTDSSKDGYAGYIEGKTNQGAFYKYLSKLLTKQEGSEYFLEKIKNEDFLRKQRTFDNGSIPHQVHLTELKAIIRRQSEYYPFLKENLDRIEKILTFRIPYYVGPLAREKSDFAWMTRKTDDSIRPWNFEELVDKEASAEAFIHRMTNNDLYLPEEKVLPKHSLIYEKFTVYNELTKVRYKNEQGETYFFDSNIKQEIFDGVFKEHRKVSKKKLLDFLAKEYEEFRIVDVIGLDKENKAFNASLGTYHDLKKILDKDFLDNPDNESILEDIVQTLTLFEDREMIKKRLENYKDLFTESQLKKLYRRHYTGWGRLSAKLINGIRDKESQKTILDYLISDGRANRNFMQLIHDDGLSFKPIIDKAQAGSHSDNLKEVVGELAGSPAIKKGILQSLKIVDELVKVMGYEPEQVVVEMARENQTTNQGRRNTRQRYKLLEEGVKNLASDLNGNILKEYPTDNQALQNERLFLYYLQNGRDMYTGEALDIDNLSQYDIDHIVPQAFIKDDSIDNRVLVSSAKNRGKSDNVPSIDIVKARKAFWKKLLDAKLMSQRKYDNLTKAERGGLTSDDKARFIQRQLVETRQITKHVARILDERFNNELDSKGRRIRKVKIVTLKSNLVSNFRKEFGFYKIREVNDYHHAHDAYLNAVVAKAILTKYPQLEPEFVYGDYPKYNSYKTRKSATEKLFFYSNIMNFFKTKVTLADGTVVVKDDIEVNNDTGEIVWDKKKHFATVRKVLSYPQVNIVKKTEIQTGGFSKESILAHGNSDKLIPRKTKDIYLDPKKYGGFDSPIVAYSVLVVADIKKGKAQKLKTVTELLGITIMERFRFEKNPSAFLESKGYLNIRDDKLMILPKYSLFELENGRRRLLASAGELQKGNELALPTQYMKFLYLASRYNELKGKPEEIEQKQEFVVQHVSYFDDILQIINDFSNRVILADANLEKINKLYQDNKENISVDELANNIINLFTFTSLGAPAAFKFFDKIVDRKRYTSTKEVLNSTLIHQSITGLYETRIDLGKLGED

SEQ ID NO: 1180 - protein, 1370 aa, Streptococcus agalactiae
  misc_feature (9)..(9): Xaa can be any naturally occurring amino acid
MNKPYSIGXDIGTNSVGWSIITDDYKVPAKKMRVLGNTDKEYIKKNLIGALLFDGGNTAADRRLKRTARRRYTRRRNRILYLQEIFAEEMSKVDDSFFHRLEDSFLVEEDKRGSKYPIFATLQEEKDYHEKFSTIYHLRKELADKKEKADLRLIYIALAHIIKFRGHFLIEDDSFDVRNTDISKQYQDFLEIFNTTFENNDLLSQNVDVEAILTDKISKSAKKDRILAQYPNQKSTGIFAEFLKLIVGNQADFKKYFNLEDKTPLQFAKDSYDEDLENLLGQIGDEFADLFSAAKKLYDSVLLSGILTVIDLSTKAPLSASMIQRYDEHREDLKQLKQFVKASLPEKYQEIFADSSKDGYAGYIEGKTNQEAFYKYLSKLLTKQEDSENFLEKIKNEDFLRKQRTFDNGSIPHQVHLTELKAIIRRQSEYYPFLKENQDRIEKILTFRIPYYIGPLAREKSDFAWMTRKTDDSIRPWNFEDLVDKEKSAEAFIHRMTNNDFYLPEEKVLPKHSLIYEKFTVYNELTKVRYKNEQGETYFFDSNIKQEIFDGVFKEHRKVSKKKLLDFLAKEYEEFRIVDVIGLDKENKAFNASLGTYHDLEKILDKDFLDNPDNESILEDIVQTLTLFEDREMIKKRLENYKDLFTESQLKKLYRRHYTGWGRLSAKLINGIRDKESQKTILDYLIDDGRSNRNFMQLINDDGLSFKSIISKAQAGSHSDNLKEVVGELAGSPAIKKGILQSLKIVDELVKVMGYEPEQIVVEMARENQTTNQGRRNSRQRYKLLDDGVKNLASDLNGNILKEYPTDNQALQNERLFLYYLQNGRDMYTGEALDIDNLSQYDIDHIIPQAFIKDDSIDNRVLVSSAKNRGKSDDVPSLEIVKDCKVFWKKLLDAKLMSQRKYDNLTKAERGGLTSDDKARFIQRQLVETRQITKHVARILDERFNNELDSKGRRIRKVKIVTLKSNLVSNFRKEFGFYKIREVNNYHHAHDAYLNAVVAKAILTKYPQLEPEFVYGDYPKYNSYKTRKSATEKLFFYSNIMNFFKTKVTLADGTVVVKDDIEVNNDTGEIVWDKKKHFATVRKVLSYPQNNIVKKTEIQTGGFSKESILAHGNSDKLIPRKTKDIYLDPKKYGGFDSPIVAYSVLVVADIKKGKAQKLKTVTELLGITIMERSRFEKNPSAFLESKGYLNIRADKLIILPKYSLFELENGRRRLLASAGELQKGNELALPTQFMKFLYLASRYNESKGKPEEIEKKQEFVNQHVSYFDDILQLINDFSKRVILADANLEKINKLYQDNKENISVDELANNIINLFTFTSLGAPAAFKFFDKIVDRKRYTSTKEVLNSTLIHQSITGLYETRIDLGKLGED

SEQ ID NO: 1181 - protein, 1125 aa, Streptococcus anginosus
MNGLVLGLDIGIASVGVGILNKETGEIIHANSRIFPAATADSNVERRGFRQGRRLGRRKKHRSARLNNLFEEFGFITDFSAIPLNLNPYALRVKGLSEELTNEELFIALKNIIKRRGISYLDDASEDGETASNEYGKAVEENRKLLADKTPGQIQLERFEKYGQVRGDFTVVENGENHRLINVFSTSAYKKEAERILRRQQEFNVRISDEFIEAYLTILTGKRKYYHGPGNEKSRTDYGRFRTDGTTLDNIFGILIGKCTFYPDEYRAAKASYTAQEFNLLNDLNNLTVPTETKKLSPEQKRQIVEYARTAKTLGTPTLLKYIAKLVDGSIDDIKGYRIDKSDKPEMHTFDAYRKMRTLDLVNIDALSRETLDDLAHILTLNTESEGILEALNSKMPSTFTKEQIDELIQFRKKNSAVFGKGWHNFSLKLMNELISELYETSEEQMTILTRLGKQRSREISKRTKYIDEKELTEEIYNPVVAKSVRQAIKIINEATKRYGIFDNIVIEMARENNEEDAKKDYIKRQKANQDEKNASMEKAAFQYNGKKELPDSIFHGHKELATKIRLWHQQGERCLYTGKNISIRDLIHNPHQYEIDHILPLSLSFDDGLANKVLVLATANQEKGQRTPFQAIDSMDDAWSYREFKQYVRNSKSLSNKKKDYLLTEEDISKIEVKQKFIERNLVDTRYSSRVVLNTLQEFYKTNDFDTKISVVRGQFTSQLRRKWKIEKSRDTYHHHAVDALIIAASSQLRLWKKQNNPLISYKEGQFVDPETGEILSLTDDEYKELVFRPPYDYFVDTLKSKSFEDSILFSYQVDSKYNRKISDATIYGTRKAQLGKDKQEETYVLGKIKDIYSQKGYEDFIKRYNKDETQFLIYHKDPQTFEKVIEEILKTYPDKELNEKGKEIPCNPFEKYRQENGPIRKYSKKGKGPEIKSLKYYDNKLGNHIDITPVNSQNQVVLQSLKPWRTDVYFNPRTSKYELMGLKYSDLRFEKGSGSYGISPEKYNKVKAKEGVNEDSEFKFTLYKNDLILIKDTETGEQQLFRYGSRNDTSKHYVELKPYEKAKFEGNQQLMNLLGTVAKGGQCLKGINKPNLSIYKVKTDVLGNKYFIKKEGDQPQLNFKKKF

SEQ ID NO: 1182 - protein, 1386 aa, Streptococcus anginosus
MNQKYSIGLDIGTNSVGWAVITDDYKVPAKKMKVLGNTDKQSIKKNLLGALLFDSGETAEATRLKRTARRRYTRRRNRLRYLQEIFAEEMMQVDESFFQRLDDSFLVDEDKRGERHPIFGNIAAEVKYHDEFPTIYHLRKHLADISQKADLRLVYLALAHMIKFRGHFLIEGQLKAENTNVQALFKDFVEVYDKTVEESHLSEITVDALSILTEKVSKSRRLENLIAHYPAEKKNTLFGNLIALFLGLQPNFKTNFQLSEDAKLQFSKDTYEEDLEGLLGEVGDEYADLFASAKNLYDAILLSGILTVDDNSTKAPLSASMVKRYEEHQKDLKKFEDFIKVNALDQYNAIFKDKNKKGYAGYIESGVKQDEFYKYLKGILLQINGSGDFLDKIDREDFLRKQRTFDNGSIPHQIHLQEMHAILRRQGEHYPFLKENQDKIEKILTFRIPYYVGPLARKGSRFAWAEYKADEKITPWNFDDILDKEKSAEKFITRMTLNDLYLPEEKVLPKHSLLYETFTVYNELTKVKYVNEQGEAKFFDANMKQEIFDHVFKENRKVTKDKLLNYLNKEFEEFRIVNLTGLDKENKVFNSSLGTYHDLRKILNKSFLDNKENAQIIEDIIQTLTLFEDREMIRQRLQKYSDIFTKAQLKKLERRHYTGWGRLSYKLINGIRNKENKKTILDYLIDDGYANRNFMQLINDDALSFKEEIAKAQIIGDVDDIANVVHDLPGSPAIKKGILQSVKIVDELVKVMGHNPANIIIEMARENQTTDRGRRNSQQRLKLLQDSLKNLDNPVNIKNVENQQLQNDRLFLYYIQNGKDMYTGETLDINNLSQYDIDHIIPQAYIKDDSFDNRVLTSSSENRGKSDNVPSIEVVCARKADWMRLRKAGLISQRKFDNLTKAERGGLTENDKAGFIKRQLVETRQITKHVAQVLDARFNAKHDENKKVIRDVKIITLKSNLVSQFRKDFKFYKVREINDYHHAHDAYLNAVIGTALLKKYPKLASEFVYGEFKKYDVRKFIAKSDKEIGKATAKYFFYSNLMNFFKKEVKFADGTVVERPDIETSEDGEIAWNKQTDFKIVRKVLSYPQVNIVKKTEVQTHGLDRGKPRGLFNANPSPKPKPDSSENLVGVKRNLDPKKYGGYAGISNSYAVLVKAIIEKGVKKKETMVLEFQGISILDRITFEKDKRAFLLGKGYKDIKKIIELPKYSLFELKDGSRRMLASILSTNNKRGEIHKGNELFVPQKFTTLLYHAKRINNPINKDHIEYVKKHRDDFKELLNYVLEFNEKYVGATKNGERLKEAVADFDSKSNEEICTSFLGAVNSKNAGLFELTSLGSASDFEFLGVKIPRYRDYTPSSLLKDSTLIHQSITGLYETRIDLSKLGED

SEQ ID NO: 1183 - protein, 1396 aa, Streptococcus anginosus
MTKPYSIGLDIGTNSVGWAVITDDYKVPAKKMKVLGNTNRDYIKKNLLGALLFDGGETAEGRRLKRTARRRYTRRKNRLRYLQEIFAEEMMQVDESFFQRLDDSFLVEEDKQGSKYPIFGTLKEEKEYHKKFKTIYHLREELANSKEKADLRLVYLALAHMIKFRGHFLYEGDLKAENTDVQALFKDFVEEYDKTIEESHLSEITVDALSILTEKVSKSSRLENLIAHYPTEKKNTLFGNLIALSLGLQANFKTNFQLSEDAKLQFSKDTYEEDLEGLLGEVGDEYADLFVSAKNLYDAILLSGILTVDDNSTKAPLSASMVKRYKEHKEELAAFKRFIKEKLPKKYEEIFKDDTKNGYAGYVGADKKLRKRSGKLATEEEFYKYVKGILNKVEGADYFLDKIDREDFLRKQRTFDNGSIPHQIHLQEMHAILRRQGEHYPFLKENQDKIEKILTFRIPYYVGPLARKGSRFAWAEYKADEKITPWNFDDILDKEKSAEKFITRMTLNDLYLPEEKVLPKHSPLYETFTVYNELTKVKYVNEQGEAKFFDTNMKQEIFDHVFKENRKVTKDKLLNYLNKEFEEFRIVNLTGLDKENKAFNASLGTYHDLRKILDKSFLDDKVNEKIIEDIIQTLTLFEDREMIRQRLQKYSDIFTTQQLKELERRHYTGWGRLSYKLINGIRNKENKKTILDYLIDDGYANRNFMQLINDDALSFKEEIARAQIIGDVDDIANVVHDLPGSPAIKKGILQSVKIVDELVKVMGHNPTNIIIEMARENQTTDKGRRNSQQRLKLLQDSLKNLDNPVNIKNVENQQLQNDRLFLYYIQNGKDMYTGETLDINNLSQYDIDHIIPQAFIKDNSLDNRVLTRSDKNRGKSDDVPSIEVVHEMKSFWSKLLSVKLITQRKFDNLTKAERGGLTENDKAGFIKRQLVETRQITKHVAQVLDARFNAKHDENKKVIRDVKIITLKSNLVSQFRKDFKFYKVREINDYHHAHDAYLNAVIGTALLKKYPKLASEFVYGEFKKYDVRKFIAKSDKEIGKATAKYFFYSNLMNFFKKEVKFADGTVVERPDIETSEDGEIAWNKQTDFKIVRKVLSYPQVNIVKKTEVQTHGLDRGKPRGLFNANPSPKPKPDSSENLVGIKRNLDPKKYGGYAGISNSYAVLVKAIIEKGVKKKETMVLEFQGISILDRITFEKDKRAFLLGKGYKDIKKIIELPKYSLFELKDGSRRMLASILSTNNKRGEIHKGNELFVPQKFTTLLYHAKRINNPINKDHIEYVKKHRDDFKELLNYVLEFNEKYVGATKNGERLKEAVADFDSKSNEEICTSFLGAVNSKNAGLFELTSLGSASDFEFLGVKIPRYRDYTPSSLLKDSILIHQSITGLYETRIDLSKLGED

SEQ ID NO: 1184 - protein, 1375 aa, Streptococcus canis
MEKKYSIGLDIGTNSVGWAVITDDYKVPSKKFKVLGNTNRKSIKKNLMGALLFDSGETAEATRLKRTARRRYTRRKNRIRYLQEIFANEMAKLDDSFFQRLEESFLVEEDKKNERHPIFGNLADEVAYHRNYPTIYHLRKKLADSPEKADLRLIYLALAHIIKFRGHFLIEGKLNAENSDVAKLFYQLIQTYNQLFEESPLDEIEVDAKGILSARLSKSKRLEKLIAVFPNEKKNGLFGNIIALALGLTPNFKSNFDLTEDAKLQLSKDTYDDDLDELLGQIGDQYADLFSAAKNLSDAILLSDILRSNSEVTKAPLSASMVKRYDEHHQDLALLKTLVRQQFPEKYAEIFKDDTKNGYAGYVGIGIKHRKRTTKLATQEEFYKFIKPILEKMDGAEELLAKLNRDDLLRKQRTFDNGSIPHQIHLKELHAILRRQEEFYPFLKENREKIEKILTFRIPYYVGPLARGNSRFAWLTRKSEEAITPWNFEEVVDKGASAQSFIERMTNFDEQLPNKKVLPKHSLLYEYFTVYNELTKVKYVTERMRKPEFLSGEQKKAIVDLLFKTNRKVTVKQLKEDYFKKIECFDSVEIIGVEDRFNASLGTYHDLLKIIKDKDFLDNEENEDILEDIVLTLTLFEDREMIEERLKTYAHLFDDKVMKQLKRRHYTGWGRLSRKMINGIRDKQSGKTILDFLKSDGFSNRNFMQLIHDDSLTFKEEIEKAQVSGQGDSLHEQIADLAGSPAIKKGILQTVKIVDELVKVMGHKPENIVIEMARENQTTTKGLQQSRERKKRIEEGIKELESQILKENPVENTQLQNEKLYLYYLQNGRDMYVDQELDINRLSDYDVDHIVPQSFIKDDSIDNKVLTRSVENRGKSDNVPSEEVVKKMKNYWRQLLNAKLITQRKFDNLTKAERGGLSEADKAGFIKRQLVETRQITKHVARILDSRMNTKRDKNDKPIREVKVITLKSKLVSDFRKDFQLYKVRDINNYHHAHDAYLNAVVGTALIKKYPKLESEFVYGDYKVYDVRKMIAKSEQEIGKATAKRFFYSNIMNFFKTEVKLANGEIRKRPLIETNGETGEVVWNKEKDFATVRKVLAMPQVNIVKKTEVQTGGFSKESILSKRESAKLIPRKKGWDTRKYGGFGSPTVAYSILVVAKVEKGKAKKLKSVKVLVGITIMEKGSYEKDPIGFLEAKGYKDIKKELIFKLPKYSLFELENGRRRMLASATELQKANELVLPQHLVRLLYYTQNISATTGSNNLGYIEQHREEFKEIFEKIIDFSEKYILKNKVNSNLKSSFDEQFAVSDSILLSNSFVSLLKYTSFGASGGFTFLDLDVKQGRLRYQTVTEVLDATLIYQSITGLYETRTDLSQLGGD

SEQ ID NO: 1185 - protein, 1345 aa, Streptococcus constellatus
MGKPYSIGLDIGTNSVGWAVVTDDYKVPAKKMKVLGNTDKQSIKKNLLGALLFDSGETAEATRLKRTARRRYTRRKNRLRYLQEIFTGEMNKVDENFFQRLDDSFLVDEDKRGEHHPIFGNIAAEVKYHDDFPTIYHLRRHLADTSKKADLRLVYLALAHMIKFRGHFLYEGDLKAENTDVQALFKDFVEEYDKTIEESHLSEITVDALSILTEKVSKSSRLENLIAHYPTEKKNTLFGNLIALSLDLHPNFKTNFQLSEDAKLQFSKDTYEEDLEGFLGEVGDEYADLFASAKNLYDAILLSGILTVDDNSTKAPLSASMVKRYEEHQKDLKKLKDFIKVNAPDQYNAIFKDKNKKGYASYIESGVKQDEFYKYLKGILLKINGSGDFLDKIDREDFLRKQRTFDNGSIPHQIHLQEMHAILRRQGEHYPFLKENQDKIEKILTFRIPYYVGPLARKGSRFAWAEYKADEKITPWNFDDILDKEKSAEKFITRMTLNDLYLPEEKVLPKHSPLYEAFTVYNELTKVKYVNEQGEAKFFDTNMKQEIFDHVFKENRKVTKDKLLNYLNKEFEEFRIVNLTGLDKENKAFNSSLGTYHDLRKILDKSFLDDKANEKTIEDIIQTLTLFEDREMIRQRLQKYSDIFTKAQLKKLERRHYTGWGRLSYKLINGIRNKENKKTILDYLIDDGYANRNFMQLINDDALSFKEEIARAQIIDDVDDIANVVHDLPGSPAIKKGILQSVKIVDELVKVMGHNPANIIIEMARENQTTDKGRRNSQQRLKLLQDSLKNLDNPVNIKNVENQQLQNDRLFLYYIQNGKDMYTGETLDINNLSQYDIDHIIPQAFIKDNSLDNRVLTRSDKNRGKSDDVPSIEVVHEMKSFWSKLLSVKLITQRKFDNLTKAERGGLTEEDKAGFIKRQLVETRQITKHVAQILDERFNTEFDGNKRRIRNVKIITLKSNLVSNFRKEFELYKVREINDYHHAHDAYLNAVVGNALLLKYPQLEPEFVYGEYPKYNSYRSRKSATEKFLFYSNILRFFKKEDIQTNEDGEIAWNKEKHIKILRKVLSYPQVNIVKKTEEQTGGFSKESILPKGESDKLIPRKTKNSYWDPKKYGGFDSPVVAYSILVFADVEKGKSKKLRKVQDMVGITIMEKKRFEKNPVDFLEQRGYRNVRLEKIIKLPKYSLFELENKRRRLLASAKELQKGNELVIPQRFTTLLYHSYRIEKDYEPEHREYVEKHKDEFKELLEYISVFSRKYVLADNNLTKIEMLFSKNKDAEVSSLAKSFISLLTFTAFGAPAAFNFFGENIDRKRYTSVTECLNATLIHQSITGLYETRIDLSKLGED

SEQ ID NO: 1186 - protein, 538 aa, Streptococcus dysgalactiae
DYDVDHIVPQSFIKDDSIDNKVLTRSDKNRGKSDNVPSEEVVKKMKNYWRQLLNAKLITQRKFDNLTKAERGGLSELDKAGFIKRQLVETRQITKHVAQILDSRMNTKYDENDKLIREVKVITLKSKLVSDFRKDFQFYKVREINNYHHAHDAYLNAVVGTALIKKYPKLESEFVYGDYKVYDVRKMIAKSEQEIGKATAKRFFYSNIMNFFKTEITLANGEIRKRPLIETNEETGEIVWDKGRDFATVRKVLSMPQVNIVKKTEVQTGALTNESIYARGSFDKLISRKHRFESSKYGGFGSPTVTYSVLVVAKSKVQDGKVKKIKTGKELIGITLLDKLVFEKNPLKFIEDKGYGNVQIDKCIRLPKYSLFEFENGTRRMLASVMANNNSRGDLQKANEMFLPAKLVTLLYHAHKIESSKELEHEAYILDHYNDLYQLLSYIERFASLYVDVEKNISKVKELFSNIESYSISEICSSVINLLTLTASGAPADFKFLGTTIPRKRYGSPQSILSSTLIHQSITGLYETRIDLSQLGGD

SEQ ID NO: 1187 - protein, 1155 aa, Streptococcus dysgalactiae
MDKKYSIGLDIGTNSVGWAVITDDYKVPSKKFKVLGNTDRHSIKKNLIGALLFDSGETAEATRLKRSARRRYTRRKNRIRYLQEIFSSEMSKVDDSFFHRLEESFLVEEDKKHERHPIFGNIVDEVAYHEKYPTIYHLRKKLADSTDKADLRLIYLALAHMIKFRGHFLIEGDLNPDNSDMDKLFIQLVQTYNQLFEENPINASRVDAKAILSARLSKSRRLENLIAQLPGEKRNGLFGNLIALSLGLTPNFKSNFDLAEDAKLQLSKDTYDDDLDNLLAQIGDQYADLFLAAKNLSDAILLSDILRVNSEITKAPLSASMIKRYDEHHQDLTLLKALVRQQLPEKYKEIFFDQSKNGYAGYIDGGASQEEFYKFIKPILEKMDGTEELLAKLNREDLLRKQRTFDNGSIPHQIHLGELHAILRRQEDFYPFLKDNREKIEKILTFRIPYYVGPLARGNSRFAWMTRKSEETITPWNFEEVVDKGASAQSFIERMTNFDKNLPNEKVLPKHSLLYEYFTVYNELTKVKYVTEGMRKPEFLSGKQKEAIVDLLFKTNRKVTVKQLKEDYFKKIECFDSVEISGVEDRFNASLGTYHDLLKIIKDKDFLDNEENEDILEDIVLTLTLFEDKEMIEERLKTYAHLFDDKVMKQLKRRHYTGWGRLSRKLINGIRDKQSGKTILDFLKSDGFANRNFIQLIHDDSLTFKEAIQKAQVSGQGHSLHEQIANLAGSPAIKKGILQSVKVVDELVKVMGHKPENIVIEMARENQTTQKGQKNSRERMKRIEEGIKELGSQILKEHPVENTQLQNEKLYLYYLQNRRDMYVDQELDINRLSDYDVDHIVPQSFIKDDSIDNKVLTRSDKNRGKSDDVPSEEVVKKMKNYWRQLLNAKLITQRKFDNLTKAERGGLSELDKAGFIKRQLVETRQITKHVAQILDSRMNTKYDENDKLIREVKVITLKSKLVSDFRKDFQFYKVREINNYHHAHDAYLNAVVGTALIKKYPKLESEFVYGDYKVYDVRKMIAKSEQEIGKATAKRFFYSNIMNFFKTEITLANGEIRKRPLIETNEETGEIVWDKGRDFATVRKVLSMPQVNIVKKTEVQTGALTNESIYARGSFDKLISRKHRFESSKYGGFGSPTVTYSVLVVAKYQSYKMEK

SEQ ID NO: 1188 - protein, 1371 aa, Streptococcus dysgalactiae
MDKKYSIGLDIGTNSVGWAVITDDYKVPSKKFKVLGNTDRHSIKKNLIGALLFDSGETAEATRLKRTARRRYTRRKNRIRYLQEIFSSEMSKVDDSFFHRLEESFLVEEDKKHERHPIFGNIVDEVAYHEKYPTIYHLRKKLADSTDKADLRLIYLALAHMIKFRGHFLIEGDLNPDNSDMDKLFIQLVQTYNQLFEENPINASRVDAKAILSARLSKSRRLENLIAQLPGEKRNGLFGNLIALSLGLTPNFKSNFDLAEDAKLQLSKDTYDDDLDNLLAQIGDQYADLFLAAKNLSDAILLSDILRVNSEITKAPLSASMIKRYDEHHQDLTLLKALVRQQLPEKYKEIFFDQSKNGYAGYIDGGASQEEFYKFIKPILEKMDGTEELLAKLNREDLLRKQRTFDNGSIPHQIHLGELHAILRRQEDFYPFLKDNREKIEKILTFRIPYYVGPLARGNSRFAWMTRKSEETITPWNFEEVVDKGASAQSFIERMTNFDKNLPNEKVLPKHSLLYEYFTVYNELTKVKYVTEGMRKPEFLSGKQKEAIVDLLFKTNRKVTVKQLKEDYFKKIECFDSVEISGVEDRFNASLGTYHDLLKIIKDKDFLDNEENEDILEDIVLTLTLFEDKEMIEERLKTYAHLFDDKVMKQLKRRHYTGWGRLSRKLINGIRDKQSGKTILDFLKSDGFANRNFIQLIHDDSLTFKEAIQKAQVSGQGHSLHEQIANLAGSPAIKKGILQSVKVVDELVKVMGHKPENIVIEMARENQTTQKGQKNSRERMKRIEEGIKELGSQILKEHPVENTQLQNEKLYLYYLQNGRDMYVDQELDINRLSDYDVDHIVPQSFIKDDSIDNKVLTRSDKNRGKSDDVPSEEVVKKMKNYWRQLLNAKLITQRKFDNLTKAERGGLSELDKAGFIKRQLVETRQITKHVAQILDSRMNTKYDENDKLIREVKVITLKSKLVSDFRKDFQFYKVREINNYHHAHDAYLNAVVGTALIKKYPKLESEFVYGDYKVYDVRKMIAKSEQEIGKATAKRFFYSNIMNFFKTEITLANGEIRKRPLIETNEETGEIVWNKGRDFATVRKVLSMPQVNIVKKTEVQTGALTNESIYARGSFDKLISRKHRFESSKYGGFGSPTVTYSVLVVAKSKVQDGKVKKIKTGKELIGITLLDKLVFEKNPLKFIEDKGYGNVQIDKCIKLPKYSLFEFENGTRRMLASVMANNNSRGDLQKANEMFLPAKLVTLLYHAHKIESSKELEHEAYILDHYNDLYQLLSYIERFASLYVDVEKNISKVKELFSNIESYSISEICSSVINLLTLTASGAPADFKFLGTTIPRKRYGSPQSILSSTLIHQSITGLYETRIDLSQLGGD

SEQ ID NO: 1189 - protein, 1371 aa, Streptococcus dysgalactiae
MDKKYSIGLDIGTNSVGWAVITDDYKVPSKKFKVLGNTDRHSIKKNLIGALLFDSGETAEATRLKRTARRRYTRRKNRIRYLQEIFSSEMSKVDDSFFHRLEESFLVEEDKKHERHPIFGNIVDEVAYHEKYPTIYHLRKKLADSTDKADLRLIYLALAHMIKFRGHFLIEGDLNPDNSDMDKLFIQLVQTYNQLFEENPINASRVDAKAILSARLSKSRRLENLIAQLPGEKRNGLFGNLIALSLGLTPNFKSNFDLAEDAKLQLSKDTYDDDLDNLLAQIGDQYADLFLAAKNLSDAILLSDILRVNSEITKAPLSASMIKRYDEHHQDLTLLKALVRQQLPEKYKEIFFDQSKNGYAGYIDGGASQEEFYKFIKPILEKMDGTEELLAKLNREDLLRKQRTFDNGSIPHQIHLGELHAILRRQEDFYPFLKDNREKIEKILTFRIPYYVGPLARGNSRFAWMTRKSEETITPWNFEEVVDKGASAQSFIERMTNFDKNLPNEKVLPKHSLLYEYFTVYNELTKVKYVTEGMRKPEFLSGKQKEAIVDLLFKTNRKVTVKQLKEDYFKKIECFDSVEISGVEDRFNASLGTYHDLLKIIKDKDFLDNEENEDILEDIVLTLTLFEDKEMIEERLKKYANLFDDKVMKQLKRRHYTGWGRLSRKLINGIRDKQSGKTILDFLKSDGFANRNFMQLINDDSLTFKEAIQKAQVSGQGHSLHEQIANLAGSPAIKKGILQSVKVVDELVKVMGHKPENIVIEMARENQTTQKGQKNSRERMKRIEEGIKELGSQILKEHPVENTQLQNEKLYLYYLQNGRDMYVDQELDINRLSDYDVDHIVPQSFIKDDSIDNKVLTRSDKNRGKSDNVPSEEVVKKMKNYWRQLLNAKLITQRKFDNLTKAERGGLSELDKAGFIKRQLVETRQITKHVAQILDSRMNTKYDENDKLIREVKVITLKSKLVSDFRKDFQFYKVREINNYHHAHDAYLNAVVGTALIKKYPKLESEFVYGDYKVYDVRKMIAKSEQEIGKATAKRFFYSNIMNFFKTEITLANGEIRKRPLIETNEETGEIVWDKGRDFATVRKVLSMPQVNIVKKTEVQTGALTNESIYARGSFDKLISRKHRFESSKYGGFGSPTVTYSVLVVAKSKVQDGKVKKIKTGKELIGITLLDKLVFEKNPLKFIEDKGYGNVQIDKCIKLPKYSLFEFENGTRRMLASVMANNNSRGDLQKANEMFLPAKLVTLLYHAHKIESSKELEHEAYILDHYNDLYQLLSYIERFASLYVDVEKNISKVKELFSNIESYSISEICSSVINLLTLTASGAPADFKFLGTTIPRKRYGSPQSILSSTLIHQSITGLYETRIDLSQLGGD

SEQ ID NO: 1190 - protein, 1371 aa, Streptococcus dysgalactiae
MDKKYSIGLDIGTNSVGWAVITDDYKVPSKKFKVLGNTDRHSIKKNLIGALLFDSGETAEATRLKRTARRRYTRRKNRIRYLQEIFSSEMSKVDDSFFHRLEESFLVEEDKKHERHPIFGNIVDEVAYHEKYPTIYHLRKKLADSTDKADLRLIYLALAHMIKFRGHFLIEGDLNPDNSDVDKLFIQLVQTYNQLFEEKPINASGVDAKAILSARLSKSKRLENLIAQLPGEKKNGLFGNLIALSLGLTPNFKSNFDLAEDAKLQLSKDTYDDDLDNLLAQIGNQYADLFLAAKNLSDAILLSDILRVNSEITKAPLSASMIKRYDEHHQDLTLLKALVRQQLPEKYKEIFFDQSKNGYAGYIDGGASQEEFYKFIKPILEKMDGTEELLAKLNREDLLRKQRTFDNGSIPHQIHLGELHAILRRQEDFYPFLKDNREKIEKILTFRIPYYVGPLARGNSRFAWMTRKSEETITPWNFEEVVDKGASAQSFIERMTNFDKNLPNEKVLPKHSLLYEYFTVYNELTKVKYVTEGMRKPEFLSGKQKEAIVDLLFKTNRKVTVKQLKEDYFKKIECFDSVEISGVEDRFNASLGTYHDLLKIIKDKDFLDNEENEDILEDIVLTLTLFEDKEMIEERLKKYANLFDDKVMKQLKRRHYTGWGRLSRKLINGIRDKQSGKTILDFLKSDGFANRNFMQLINDDSLTFKEAIQKAQVSGQGHSLHEQIANLAGSPAIKKGILQSVKVVDELVKVMGHKPENIVIEMARENQTTQKGQKNSRERMKRIEEGIKELGSQILKEHPVENTQLQNEKLYLYYLQNGRDMYVDQELDINRLSDYDVDHIVPQSFIKDDSIDNKVLTRSDKNRGKSDNVPSEEVVKKMKNYWRQLLNAKLITQRKFDNLTKAERGGLSELDKAGFIKRQLVETRQITKHVAQILDSRMNTKYDENDKLIREVKVITLKSKLVSDFRKDFQFYKVREINNYHHAHDAYLNAVVGTALIKKYPKLESEFVYGDYKVYDVRKMIAKSEQEIGKATAKRFFYSNIMNFFKTEITLANGEIRKRPLIETNEETGEIVWDKGRDFATVRKVLSMPQVNIVKKTEVQTGALTNESIYARGSFDKLISRKHRFESSKYGGFGSPTVTYSVLVVAKSKVQDGKVKKIKTGKELIGITLLDKLVFEKNPLKFIEDKGYGNVQIDKCIKLPKYSLFEFENGTRRMLASVMANNNSRGDLQKANEMFLPAKLVTLLYHAHKIESSKELEHEAYILDHYNDLYQLLSYIERFASLYVDVEKNISKVKELFSNIESYSISEICSSVINLLTLTASGAPADFKFLGTTIPRKRYGSPQSILSSTLIHQSITGLYETRIDLSQLGGD

SEQ ID NO: 1191 - protein, 1370 aa, Streptococcus gallolyticus; identical to SEQ ID NO: 204

SEQ ID NO: 1192 - protein, 1375 aa, Streptococcus infantarius
MEKSYSIGLDIGTNSVGWAVITDDYKVPAKKMKVLGNTDKKYIKKNLLGALLFDSGETAEVTRLKRTARRRYTRRKNRLRYLQEIFAKEMTKVDESFFQRLEESFLTDDDKTFDSHPIFGNKAEEDAYHQKFPTIYHLRKYLADSQEKADLRLVYLALAHMIKYRGHFLIEGELNAENTDVQKLFNVFVETYDKIVDESHLSEIEVDASSILTEKVSKSRRLENLIKQYPTEKKNTLFGNLIALALGLQPNFKTNFKLSEDAKLQFSKDTYEEDLEELLGKVGDDYADLFISAKNLYDAILLSGILTVDDNSTKAPLSASMIKRYVEHHEDLEKLKEFIKINKLKLYHDIFKDKTKNGYAGYIDNGVKQDEFYKYLKTILTKIDDSDYFLDKIERDDFLRKQRTFDNGSIPHQIHLQEMHSILRRQGDYYPFLKENQAKIEKILTFRIPYYVGPLARKDSRFAWANYHSDEPITPWNFDEVVDKEKSAEKFITRMTLNDLYLPEEKVLPKHSHVYETFTVYNELTKIKYVNEQGESFFFDANMKQEIFDHVFKENRKVTKAKLLSYLNNEFEEFRINDLIGLDKDSKSFNASLGTYHDLKKILDKSFLDDKTNGQIIEDIVLTLTLFEDRDMIHERLQKYSDFFTSQQLKKLERRHYTGWGRLSYKLINGIRNKENNKTILDFLIDDGHANRNFMQLINDESLSFKTIIQEAQVVGDVDDIEAVVHDLPGSPAIKKGILQSVKIVDELVKVMGDNPDNIVIEMARENQTTGYGRNKSNQRLKRLQDSLKEFGSDILSKKKPSYVDSKVENSHLQNDRLFLYYIQNGKDMYTGEELDIDRLSDYDIDHIIPQAFIKDNSIDNKVLTSSAKNRGKSDDVPSIEIVRNRRSYWYKLYKSGLISKRKFDNLTKAERGGLTEADKAGFIKRQLVETRQITKHVAQILDARFNTKRDENDKVIRDVKVITLKSNLVSQFRKEFKFYKVREINDYHHAHDAYLNAVVGTALLKKYPKLTPEFVYGEYKKYDVRKLIAKSSDDYSEMGKATAKYFFYSNLMNFFKTEVKYADGRVFERPDIETNADGEVVWNKQKDFDIVRKVLSYPQVNIVKKVEAQTGGFSKESILSKGDSDKLIPRKTKKVYWNTKKYGGFDSPTVAYSVLVVADIEKGKAKKLKTVKELVGISIMERSFFEENPVSFLEKKGYHNVQEDKLIKLPKYSLFEFEGGRRRLLASATELQKGNEVMLPAHLVELLYHAHRIDSFNSTEHLKYVSEHKKEFEKVLSCVENFSNLYVDVEKNLSKVRAAAESMTNFSLEEISASFINLLTLTALGAPADFNFLGEKIPRKRYTSTKECLSATLIHQSVTGLYETRIDLSKLGEE

SEQ ID NO: 1193 - protein, 1368 aa, Streptococcus iniae
MRKPYSIGLDIGTNSVGWAVITDDYKVPSKKMRIQGTTDRTSIKKNLIGALLFDNGETAEATRLKRTTRRRYTRRKYRIKELQKIFSSEMNELDIAFFPRLSESFLVSDDKEFENHPIFGNLKDEITYHNDYPTIYHLRQTLADSDQKADLRLIYLALAHIIKFRGHFLIEGNLDSENTDVHVLFLNLVNIYNNLFEEDIVETASIDAEKILTSKTSKSRRLENLIAEIPNQKRNMLFGNLVSLALGLTPNFKTNFELLEDAKLQISKDSYEEDLDNLLAQIGDQYADLFIAAKKLSDAILLSDIITVKGASTKAPLSASMVQRYEEHQQDLALLKNLVKKQIPEKYKEIFDNKEKNGYAGYIDGKTSQEEFYKYIKPILLKLDGTEKLISKLEREDFLRKQRTFDNGSIPHQIHLNELKAIIRRQEKFYPFLKENQKKIEKLFTFKIPYYVGPLANGQSSFAWLKRQSNESITPWNFEEVVDQEASARAFIERMTNFDTYLPEEKVLPKHSPLYEMFMVYNELTKVKYQTEGMKRPVFLSSEDKEEIVNLLFKKERKVTVKQLKEEYFSKMKCFHTVTILGVEDRFNASLGTYHDLLKIFKDKAFLDDEANQDILEEIVWTLTLFEDQAMIERRLVKYADVFEKSVLKKLKKRHYTGWGRLSQKLINGIKDKQTGKTILGFLKDDGVANRNFMQLINDSSLDFAKIIKNEQEKTIKNESLEETIANLAGSPAIKKGILQSIKIVDEIVKIMGQNPDNIVIEMARENQSTMQGIKNSRQRLRKLEEVHKNTGSKILKEYNVSNTQLQSDRLYLYLLQDGKDMYTGKELDYDNLSQYDIDHIIPQSFIKDNSIDNTVLTTQASNRGKSDNVPNIETVNKMKSFWYKQLKSGAISQRKFDHLTKAERGALSDFDKAGFIKRQLVETRQITKHVAQILDSRFNSNLTEDSKSNRNVKIITLKSKMVSDFRKDFGFYKLREVNDYHHAQDAYLNAVVGTALLKKYPKLEAEFVYGDYKHYDLAKLMIQPDSSLGKATTRMFFYSNLMNFFKKEIKLADDTIFTRPQIEVNTETGEIVWDKVKDMQTIRKVMSYPQVNIVMKTEVQTGGFSKESIWPKGDSDKLIARKKSWDPKKYGGFDSPIIAYSVLVVAKIAKGKTQKLKTIKELVGIKIMEQDEFEKDPIAFLEKKGYQDIQTSSIIKLPKYSLFELENGRKRLLASAKELQKGNELALPNKYVKFLYLASHYTKFTGKEEDREKKRSYVESHLYYFDEIMQIIVEYSNRYILADSNLIKIQNLYKEKDNFSIEEQAINMLNLFTFTDLGAPSAFKFFNGDIDRKRYSSTNEIINSTLIYQSPTGLYETRIDLSKLGGK

SEQ ID NO: 1194 - protein, 1392 aa, Streptococcus mitis
MNNNNYSIGLDIGTNSVGWAVITDDYKVPSKKMKVLGNTDKHFIKKNLIGALLFDEGATAEDRRFKRTARRRYTRRKNRLRYLQEIFSEEMSKVDSSFFHRLDDSFLVPEDKRGSKYPIFATLAEEKEYHKKFPTIYHLRKHLADSKEKTDLRLIYLALAHMIKYRGHFLYEESFDIKNNDIQKIFSEFISIYDNTFEGSSLSGQNAQVEAIFTDKISKSAKRERILKLFAYEKSTDLFSEFLKLIVGNQADFKKHFDLEEKAPLQFSKDTYDEDLENLLGQIGDDFADLFLVAKKLYDAILLSGILTVTDSSTKAPLSASMIERYENHQKDLAALKQFIQNNLQEKYDEVFSDQSKDGYARYINGKTTQEAFYKYIKNLLSKFEGSDYFLDKIEREDFLRKQRTFDNGSIPHQIHLQEMNAIIRRQGEHYPFLKEYKEKIETILTFRIPYYVGPLARGNRNFAWLTRNSDQAIRPWNFEEIVDQASSAEEFINKMTNYDLYLPEEKVLPKHSLLYETFAVYNELTKVKFISEGLRDYQFLDSGQKKQIVNQLFKEKRKVTEKDIIQYLHNVDGYDGIELKGIEKQFNASLSTYHDLLKIIKDKEFMDDPKNEEILENIVHTLTIFEDREMIKQRLAQYASIFDKKVIKALTRRHYTGWGKLSAKLINGICDKKTGKTILDYLIDDGYSNRNFMQLINDDGLSFKDIIQKAQVVGKTNDVKQVVQELPGSPAIKKGILQSIKLVDELVKVMGHAPESIVIEIARENQTTARGKKNSQQRYKRIEDALKNLAPGLDSNILKEHPTDNIQLQNDRLFLYYLQNGKDMYTGEALDINQLSSYDIDHIVPQAFIKDDSLDNRVLTSSKDNRGKSDNVPSLEVVQKRKAFWQQLLDSKLISEHKFNNLTKAERGGLDERDKVGFIRRQLVETRQITKHVAQILDARFNTEVNEKDKKNRTVKIITLKSNLVSNFRKEFKLYKVREINDYHHAHDAYLNAVVAKAILKKYPKLEPGFVYGDYQKYDIKRYISRSKDPKEVEKATEKYFFYSNLLNFFKEEVHYADGTIVKRENIEYSKDTGEIAWNKEKDFATIKKVLSLPQVNIVKKTEIQTHGLDRGKPRGLFNSNPSPKPSEDRKENLVPIKQGLDPRKYGGYAGISNSYAVLVKAIIEKGAKKQQKTVLEFQGISILDKINFEKNKENYLLEKGYIKILSTITLPKYSLFEFPDGTRRRLASILSTNNKRGEIHKGNELVIPEKYTTLLYHAKNINKTLEPEHLEYVEKHRNDFAKLLEYVLNFNDKYVGALKNGERIRQAFIDWETVDIEKLCFSFIGPRNSKNAGLFELTSQGSASDFEFLGVKIPRYRDYTPSSLLNATLIHQSITGLYETRIDLSKLGED

SEQ ID NO: 1195 - protein, 1134 aa, Streptococcus mutans
MANGKILGLDIGIASVGVGIIDKETGKIIHVNSRIFPAATADSNVERRGFRQGRRLVRRKKHRKVRLADLFLDSNLLTDFSKVSLNLNPYQLRVKGLNEELSNEELFIALKSIVSRRGISYLDDASEDSGANSSEYGKAVEENRKLLEDRTPGQIQLERFEKYGKVRGDFTVVENGENHRLINVFSTSAYKKEAERILRRQQEFNMRIADEFIEAYLTILTGKRKYYHGPGNEKSRTDYGRFRTDGTTLDNIFGILIGKCTFYPDEYRAAKASYTAQEFNLLNDLNNLTVPTETKKLSEEQKRQIIEHAKTVKTLGAPTLLKYIVKLVGCSADDIKGYRIDKSDKPEIHTFEAYRKMRTMELIKVDDLSRESLDALAHILTLNTEREGIEEAIRDRFTNKEFNQEQINELVLFRKNNSSLFGKGWHNFSLKLMKELIPELYETSEEQMTILTRLGKQRVKKSSNRTNYIDEKELTEEIYNPVVAKSVRQAIKIINLATKKYGVFDNIVIEMARESNEDDEKKAIQNAQKANEDEKKAALLKAAHQFNGKEELPDSIFHGHKELLTKIRLWHQQGEKCLYTGKTIFINDLIHNPYKYEIDHILPLSLSFDDSLANKVLVLSTANQEKGQRTPFQSLDSMDGAWTYREFKSYVKGLKTLSNKKKDYLLTEENIDKIEVKQKFIERNLVDTRYSSRVVLNALQDFYKERKFDTKISVVRGQFTSQLRRKWRIEKTRETYHHHAVDALIIAASSQLNLWKKQNNPLISYKEDQFVDPETGEILSLSDDEYKKLVFKAPYEHFVDTLKSKKFEDSILFSYQVDSKYNRKISGATICGTRKAQLGKDTQEETYVLGKIKDIYSQKGYEDFIKKYKKDKTQFLMYHKDPQTFEKVIEEILKTYPDKELNEKGKEVSCNPFEKYRQENGPVRKYSKKGNGPEIKSLKYYDEVLGKNIDITPKNSLNKVVLRSLNPWRTDVYFNHETRKYEFLGLKYSDLRYLKGEHRYGILIGDYKKIKDKEGIEKESEFKFTLYKNDLILIKDTAKGKEELFRFWSRTGKDNAKTFEKNKIELKPYSKSQFEKGEDTNVLGKLYASSNQLQKSFGTLENLSIYKVRTDVLGNKYFIKKEGDKPQLNFKKKL

SEQ ID NO: 1196 - protein, 1134 aa, Streptococcus mutans; identical to SEQ ID NO: 1195

SEQ ID NO: 1197 - protein, 1128 aa, Streptococcus mutans
MANSKILGLDIGIASVGVGIIDKETGKIIHVNSRIFPAATADSNVERRGFRQGRRLVRRKKHRKVRLADLFLDSNLLTDFSKVSLNLNPYQLRVKGLNEELSNEELFIALKSIVSRRGISYLDDASEDSGANSSEYGKAVEENRKLLEDRTPGQIQLERFEKYGKVRGDFTVVENGENHRLINVFSTSAYKKEAERILRRQQEFNIRIADEFIEAYLTILTGKRKYYHGPGNEKSRTDYGRFRTDGTTLDNIFGILIGKCTFYPDEYRAAKASYTAQEFNLLNDLNNLTVPTETKKLSEEQKRQIIEHAKTVKTLGAPTLLKYIAKLVGCSADDIKGYRIDKSDKPEIHTFEAYRKMRTMELIKVADLSRESLDALAHILTLNTEREGIEEAIRDRFTNKEFNQEQINELVLFRKNNSSLFGKGWHNFSLKLMKELIPELYETSEEQMTILTRLGKQRVKKSSNRTNYIDEKELTEEIYNPVVAKSVRQAIKIINLATKKYGVFDNIVIEMARESNEDDEKKAIQNAQKANEDEKEAALLKAAHQFNGKEELPDSIFHGHKELLTKIRLWHQQGEKCLYTGKTIFINDLIHNPYKYEIDHILPLSLSFDDSLANKVLVLSTANQEKGQRTPFQSLDSMDGAWTYREFKAYVKGLKTLSNKKKDYLLNEEDINKNEVKQKFIERNLVDTRYSSRVVLNTLQDFYKKREFDTKISVVRGQFTSQIRRKWRIEKTRETYHHHAVDALIIAASSQLNLWKKQNNPLISYKEDQFVDPETGEILSLSDDEYKELVFKAPYDHFVDTLKSKKFEDSILFSYQVDSKYNRKISDATIYGTRKARLGKDSQEETYVLGKIKDIYSQKGYEDFIKKYKKDKTQFLMYHKDPQTFEKVIEEILKTYSDKELNEKGKEVPCNPFEKYRQENGPVRKYSKKGNGPEIKSIKYYDNKLGNHIDITPNNSHHQVVLQSLKPWRTDVYFNPKSGKYELMGLKYSDLRFEKVSGDYGISVKKYNEIKSKEGVDENSEFKFTLYKNDLILIKDTESGEQELFRFLSRTMPNQKHYVELKPYDKSKFEGHQKLMDIFGEVAKGGQCLKGLNKSNISIYKVKTDVLGNKYFIKKEGDQPQLNFKKKI

SEQ ID NO: 1198 - protein, 1128 aa, Streptococcus mutans; identical to SEQ ID NO: 1197

SEQ ID NO: 1199 - protein, 1338 aa, Streptococcus mutans
MDLIGTNSVGWAVVTDDYKVPAKKMKVLGNTDKSHIKKNLLGALLFDSGNTAADRRLKRTARRRYTRRRNRILYLQEIFAEEMSKVDDSFFHRLEDSFLVTEDKRGERHPIFGNLEEEVKYHENFPTIYHLRQYLADNPEKVDLRLVYLALAHIIKFRGHFLIEGKFDTRNNDVQRLFQEFLAVYDNTFENSSLQEQNVQVEEILTDKISKSAKKDRVLKLFPNEKSNGRFAEFLKLIVGNQADFKKHFELEEKAPLQFSKDTYEEELEVLLAQIGDNYAELFLSAKKLYDSILLSGILTVTDVSTKAPLSASMIQRYNEHQMDLAQLKQFIRQKLSDKYNEVFSDVSKDGYAGYIDGKTNQEAFYKYLKGLLNKIEGSGYFLDKIEREDFLRKQRTFDNGSIPHQIHLQEMRAIIRRQAEFYPFLADNQDRIEKILTFRIPYYVGPLARGKSDFAWLSRKSADKITPWNFDEIVDKESSAEAFINRMTNYDLYLPNQKVLPKHSLLYEKFTVYNELTKVKYKTEQGKTAFFDANMKQEIFDGVFKVYRKVTKDKLMDFLEKEFDEFRIVDLTGLDKENKAFNASYGTYHDLRKILDKDFLDNSKNEKILEDIVLTLTLFEDREMIRKRLENYSDLLTKEQVKKLERRHYTGWGRLSAELIHGIRNKESRKTILDYLIDDGNSNRNFMQLINDDALSFKEEIAKAQVIGETDNLNQVVSDIAGSPAIKKGILQSLKIVDELVKIMGHQPENIVVEMARENQFTNQGRRNSQQRLKGLTDSIKEFGSQILKEHPVEHSQLQNDRLFLYYLQNGRDMYTGEELDIDYLSQYDIDHIIPQAFIKDNSIDNRVLTSSKENRGKSDDVPSKNVVRKMKSYWSKLLSAKLITQRKFDNLTKAERGGLTDDDKAGFIKRQLVETRQITKHVARILDERFHTETDENNKKIRQVKIVTLKSNLVSNFRKEFELYKVREINDYHHAHDAYLNAVIGKALLGVYPQLEPEFVYGDYPHFHGHKENKATAKKFFYSNIMNFFKKDDVRTDKNGEIIWKKDEHISNIKKVLSYPQVNIVKKVEEQTGGFSKESILPKGNSDKLIPRKTKKFYWDTKKYGGFDSPIVAYSILVIADIEKGKSKKLKTVKALVGVTIMEKMTFERDPVAFLERKGYRNVQEENIIKLPKYSLFKLENGRKRLLASARELQKGNEIVLPNHLGTLLYHAKNIHKVDEPKHLDYVDKHKDEFKELLDVVSNFSKKYTLAEGNLEKIKELYAQNNGEDLKELASSFINLLTFTAIGAPATFKFFDKNIDRKRYTSTTEILNATLIHQSITGLYETRIDLSKLGGD

SEQ ID NO: 1200 - protein, 1338 aa, Streptococcus mutans; identical to SEQ ID NO: 1199

SEQ ID NO: 1201 - protein, 1345 aa, Streptococcus mutans
MKKPYSIGLDIGTNSVGWAVVTDDYKVPAKKMKVLGNTDKSHIEKNLLGALLFDSGNTAEDRRLKRTARRRYTRRRNRILYLQEIFSEEMGKVDDSFFHRLEDFFLVTEDKRGERHPIFGNLEEEVKYHENFPTIYHLRQYLADNPEKVDLRLVYLALAHIIKFRGHFLIEGKFDTRNNDVQRLFQEFLAVYDNTFENSSLQEQNVQVEEILTDKISKSAKKDRVLKLFPNEKSNGRFAEFLKLIVGNQADFKKHFELEEKAPLQFSKDTYEEELEVLLAQIGDNYAELFLSAKKLYDSILLSGILTADDSSTKAPLSASMIQRYNEHQMDLAQLKQFIRQKLSDKYNEVFSDVSKDGYAGYIDGKTNQEAFYKYLKGLLNKIEGSGYFLDKIEREDFLRKQRTFDNGSIPHQIHLQEMRAIIRRQSEFYPFLADNQDRIEKILTFRIPYYVGPLARGKSDFAWLSRKSADKITPWNFDEIVDKESSAEAFINRMTNYDLYLPNQKVLPKHSLLYEKFTVYNELTKVKYKTEQGETAFFDANMKQEIFDGVFKVYRKVTKDKLMDFLEKEFDEFRIVDLTGLDKENKAFNASYGTYHDLRKILDKDFLDNSKNEKILEDIVLTLTLFEDREMIRKRLKNYSDLLTKEQLKKLERRHYTGWGRLSAELIHGIRNKESRKTILDYLIDDGNSNRNFMQLINDDALSFKEEIAKAQVIGETDNLNQVVSDIAGSPAIKKGILQSLKIVDELVKIMGHQPENIVVEMARENQFTNQGRRNSQQRLKGLTDSIKEFGSQILKEHPVENSQLQNDRLFLYYLQNGRDMYTGEELDIDYLSQYDIDHIIPQAFIKDNSIDNRVLTSSKENRGKSDDVPSKDVVRKMKPYWSKLLSAKLITQRKFDNLTKAERGGLTDDDKAGFIKRQLVETRQITKHVARILDERFNTETDENNKKIRQVKIVTLKSNLVSNFRKEFELYKVREINDYHHAHDAYLNAVIGKALLGVYPQLEPEFVYGDYPHFHGHEENKATAKKFFYSNIMNFFKKDDVRTDKNGEIIWKKDEHISNIKKVLSYPQVNIVKKVEEQTGGFSKESILPKGNSDKLIPRKTKKFYWDTKKYGGFDSPIVAYSILVIADIEKGKSKKLKTVKALVGVTIMEKMTFERDPVAFLERKGYRNVQEENIIKLPKYSLFKLENGRKRLLASARELQKGNEIVLPNHLGTLLYHAKNIHKVDEPKHLDYVDKHKDEFKELLDVVSNFSKKYTLAEGNLEKIKELYAQNNGEDLKELASSFINLLTFTAIGAPATFKFFDKNIDRKRYTSTTEILNATLIHQSITGLYETRIDLSKLGGD

SEQ ID NO: 1202 - protein, 1345 aa, Streptococcus mutans; identical to SEQ ID NO: 1201

SEQ ID NO: 1203 - protein, 1229 aa, Streptococcus mutans
MKKPYSIGLDIGTNSVGWAVVTDDYKVPAKKMKVLGNTDKSHIEKNLLGALLFDSGNTAEDRRLKRTARRRYTRRRNRILYLQEIFSEEMGKVDDSFFHRLEDSFLVTEDKRGERHPIFGNLEEEVKYHENFPTIYHLRQYLADNPEKVDLRLVYLALAHIIKFRGHFLIEGKFDTRNNDVQRLFQEFLAVYDNTFENSSLQEQNIQVEEILTDKISKSAKKDRVLKLFPNEKSNGRFAEFLKLIVGNQADFKKHFELEEKAPLQFSKDTYEEELEVLLAQIGDNYAELFLSAKKLYDSILLSGILTVTDVGTKAPLSASMIQRYNEHQMDLTQLKQFIRQKLSDKYNEVFSDVSKDGYAGYIDGKTNQEAFYKYLKGLLNKIEGSGYFLDKIEREDFLRKQRTFDNGSIPHQIHLQEMRAIIRRQAEFYPFLADNQDRIEKILTFRIPYYVGPLARGKSDFAWLSRKSADKITPWNFDEIVDKESSAEAFINRMTNYDLYLPNQKVLPKHSLLYEKFTVYNELTKVKYKTEQGKTAFFDANMKQEIFDGVFKVYRKVTKDKLMDFLEKEFDEFRIVDLTGLDKENKVFNASYGTYHDLCKILDKDFLDNSKNEKILEDIVLTLTLFEDREMIRKRLENYSDLLTKEQVKKLERRHYTGWGRLSAELIHGIRNKESRKTILDYLIDDGNSNRNFMQLINDDALSFKEEIAKAQVIGETDNLNQVVSDIAGSPAIKKGILQSLKIVDELVKIMGHQPENIVVEMARENQFTNQGRRNSQQRLKGLTDSIKEFGSQILKEHPVENSQLQNDRLFLYYLQNGRDMYTGEELDIDYLSQYDIDHIIPQAFIKDNSIDNRVLTSSKENRGKSDDVPSKDVVRKMKPYWSKLLSAKLITQRKFDNLTKAERGGLTDDDKAGFIKRQLVETRQITKHVARILDERFNTETDENNKKIRQVKIVTLKSNLVSNFRKEFELYKVREINDYHHAHDAYLNAVIGKALLGVYPQLEPEFVYGDYPHFHGHEENKATAKKFFYSNIMNFFKKDDVRTDKNGEIIWKKDEHISNIKKVLSYPQVNIVKKVEEQTIGQNGGLFDDNPKSPLEVIPSKLVPLKKALNPEKYGGYQKPTTAYPILLIVDTKQLIPISVMDKKRFEQNPVKFLKDKGYQQIEKNNFVKLPKYTLVDIGNGIKRLWASSKEVHKGNQLVVSKKSQDLLYHAHHLDNDYSNEYVKNHY

SEQ ID NO: 1204 - protein, 1229 aa, Streptococcus mutans; identical to SEQ ID NO: 1203

SEQ ID NO: 1205 - protein, 1345 aa, Streptococcus mutans
MKKPYSIGLDIGTNSVGWAVVTDDYKVPAKKMKVLGNTDKSHIEKNLLGALLFDSGNTAEDRRLKRTARRRYTRRRNRILYLQEIFSEEMGKVDDSFFHRLEDSFLVTEDKRGERHPIFGNLEEEVKYHENFPTIYHLRQYLADNPEKVDLRLVYLALAHIIKFRGHFLIEGKFDTRNNDVQRLFQEFLAVYDNTFENSSLQEQNVQVEEILTDKISKSAKKDRVLKLFPNEKSNGRFAEFLKLIVGNQADFKKHFELEEKAPLQFSKDTYEEELEVLLAQIGDNYAELFLSAKKLYDSILLSGILTVTDVGTKAPLSASMIQRYNEHQMDLAQLKQFIRQKLSDKYNEVFSDVSKDGYAGYIDGKTNQEAFYKYLKGLLNKIEGSGYFLDKIEREDFLRKQRTFDNGSIPHQIHLQEMRAIIRRQAEFYPFLADNQDRIEKLLTFRIPYYVGPLARGKSDFAWLSRKSADKITPWNFDEIVDKESSAEAFINRMTNYDLYLPNQKVLPKHSLLYEKFTVYNELIKVKYKTEQGKTAFFDANMKQEIFDGVFKVYRKVTKDKLMDFLEKEFDEFRIVDLTGLDKENKVFNASYGTYHDLCKILDKDFLDNSKNEKILEDIVLTLTLFEDREMIRKRLENYSDLLTKEQVKKLERRHYTGWGRLSAELIHGIRNKESRKTILDYLIDDGNSNRNFMQLINDDALSFKEEIAKAQVIGETDNLNQVVSDIAGSPAIKKGILQSLKIVDELVKIMGHQPENIVVEMARENQFTNQGRRNSQQRLKGLTDSIKEFGSQILKEHPVENSQLQNDRLFLYYLQNGRDMYTGEELDIDYLSQYDIDHIIPQAFIKDNSIDNRVLTSSKENRGKSDDVPSKDVVRKMKSYWSKLLSAKLITQRKFDNLTKAERGGLTDDDKAGFIKRQLVETRQITKHVARILDERFNTETDENNKKIRQVKIVTLKSNLVSNFRKEFELYKVREINDYHHAHDAYLNAVIGKALLGVYPQLEPEFVYGDYPHFHGHKENKATAKKFFYSNIMNFFKKDDVRTDKNGEIIWKKDEHISNIKKVLSYPQVNIVKKVEEQTGGFSKESILPKGNSDKLIPRKTKKFYWDTKKYGGFDSPIVAYSILVIADIEKGKSKKLKTVKALVGVTIMEKMTFERDPVAFLERKGYRNVQEENIIKLPKYSLFKLENGRKRLLASARELQKGNEIVLPNHLGTLLYHAKNIHKVDEPKHLDYVDKHKDEFKELLDVVSNFSKKYTLAEGNLEKIKELYAQNNGEDLKELASSFINLLTFTAIGAPATFKFFDKNIDRKRYTSTTEILNATLIHQSITGLYETRIDLNKLGGD

SEQ ID NO: 1206 - protein, 1350 aa, Streptococcus mutans
MKKPYSIGLDIGTNSVGWAVVTDDYKVPAKKMKVLGNTDKSHIEKNLLGALLFDSGNTAEDRRLKRTARRRYTRRRNRILYLQEIFSEEMGKVDDSFFHRLEDSFLVTEDKRGERHPIFGNLEEEVKYHENFPTIYHLRQYLADNPEKVDLRLVYLALAHIIKFRGHFLIEGKFDTRNNDVQRLFQEFLAVYDNTFENSSLQEQNVQVEEILTDKISKSAKKDRVLKLFPNEKSNGRFAEFLKLIVGNQADFKKHFELEEKAPLQFSKDTYEEELEVLLAQIGDNYAELFLSAKKLYDSILLSGILTVTDVSTKAPLSASMIQRYNEHQMDLTQLKQFIRQKLSDKYNEVFSDVSKDGYAGYIDGKTNQEAFYKYLKGLLNKIEGSGYFLDKIEREDFLRKQRTFDNGSIPHQIHLQEMRAIIRRQAEFYSFLADNQDRIEKILTFRIPYYVGPLARGKSDFAWLSRKSADKITPWNFDEIVDKESSAEAFINRMTNYDLYLPNQKVLPKHSLLYEKFTVYNELTKVKYKTEQGKTAFFDANMKQEIFDGVFKVYRKVTKDKLMDFLEKEFDEFRIVDLTGLDKENKAFNASYGTYHDLRKILDKDFLDNSKNEKILEDIVLTLTLFEDREMIRKRLENYSDLLTKEQVKKLERRHYTGWGRLSAELIHGIRNKESRKTILDYLIDDGNSNRNFMQLINDDALSFKEEIAKAQVIGETDNLNQVVSDIAGSPAIKKGILQSLKIVDELVKIMGHQPENIVVEMARENQFTNQGRRNSQQRLKGLTDSIKEFGSQILKEHPVENSQLQNDRLFLYYLQNGRDMYTGEELDIDYLSQYDIDHIIPQAFIKDNSIDNRVLTSSKENRGKSDDVPSEDVVNRMRPFWNKLLSSGLISQRKYNNLTKKELTLDDKAGFIKRQLVETRQITKHVARMLDERFNKEFDDNNKRIRKVKIVTLKSNLVSSFRKEFELYKVREINDYHHAHDAYLNAVVVKALLVKYSKLEPEFVYGEYPKYNSYRERKTATQKMFFYSNIMNMFKSKVKLADDQIVERPMIEVNDETGEIAWDKTKHITTVKKVLSYPQVNIVKKVEEQTIGQNGGLFDDNPKSPLEVIPSKLVPLKKALNPEKYGGYQKPTTAYPILLIVDTKQLIPISVMDKKRFEQNPVKFLKDKGYQQIEKNNFVKLPKYTLVDIGNGIKRLWASSKEVHKGNQLVVSKKSQDLLYHAHHLDNDYSNEYVKNHYQQFDILFNEITSFSKKCKLGKEHIQKIEEAYSKERDSASIEELADGFIKLLGFTQLGATSPFSFLGIKLNQKQYTGKKDYLLPCMEATLIHQSITGLYETRIDLSKLGGD

SEQ ID NO: 1207 - protein, 1350 aa, Streptococcus mutans
MKKPYSIGLDIGTNSVGWAVVTDDYKVPAKKMKVLGNTDKSHIEKNLLGALLFDSGNTAEDRRLKRTARRRYTRRRNRILYLQEIFSEEMGKVDDSFFHRLEDSFLVTEDKRGERHPIFGNLEEEVKYHENFPTIYHLRQYLADNPEKVDLRLVYLALAHIIKFRGHFLIEGKFDTRNNDVQRLFQEFLAVYDNTFENSSLQEQNVQVEEILTDKISKSAKKDRVLKLFPNEKSNGRFAEFLKLIVGNQADFKKHFELEEKAPLQFSKDTYEEELEVLLAQIGDNYAELFLSAKKLYDSILLSGILTVTDVSTKAPLSASMIQRYNEHQMDLTQLKQFIRQKLSDKYNEVFSDVSKDGYAGYIDGKTNQEAFYKYLKGLLNKIEGSGYFLDKIEREDFLRKQRTFDNGSIPHQIHLQEMRAIIRRQAEFYPFLADNQDRIEKILTFRIPYYVGPLARGKSDFAWLSRKSADKITPWNFDEIVDKESSAEAFINRMTNYDLYLPNQKVLPKHSLLYEKFTVYNELTKVKYKTEQGKTAFFDANMKQEIFDGVFKVYRKVTKDKLMDFLEKEFDEFRIVDLTGLDKENKAFNASYGTYHDLRKILDKDFLDNSKNEKILEDIVLTLTLFEDREMIRKRLKNYSDLLTKEQLKKLERRHYTGWGRLSAELIHGIRNKESRKTILDYLIDDGNSNRNFMQLINDDALSFKEEIAKAQVIGETDNLNQVVSDIAGSPAIKKGILQSLKIVDELVKIMGHQPENIVVEMARENQFTNQGRQNSQQRLKGLTDSIKEFGSQILKEHPVENSQLQNDRLFLYYLQNGRDMYTGEELDIDYLSQYDIDHIIPQAFIKDNSIDNRVLTSSKENRGKSDDVPSEDVVNRMRPFWNKLLSSGLISQRKYNNLTKKELTLDDKAGFIKRQLVETRQITKHVARMLDERFNKEFDDNNKRICKVKIVTLKSNLVSSFRKEFELYKVREINDYHHAHDAYLNAVVVKALLVKYSKLEPEFVYGEYPKYNSYRERKTATQKMFFYSNIMNMFKSKVKLADDQIVERPMIEVNDETGEIAWDKTKHITTVKKVLSYPQVNIVKKVEEQTIGQNGGLFDDNPKSPLEVIPSKLVPLKKALNPEKYGGYQKPTTAYPILLIVDTKQLIPISVMDKKRFEQNPVKFLKDKGYQQIEKNNFVKLPKYTLVDIGNGIKRLWASSKEVHKGNQLVVSKKSQDLLYHAHHLDNDYSNEYVKNHYQQFDILFNEITSFSKKCKLGKEHIQKIEEAYSKERDSASIEELADGFIKLLGFTQLGATSPFSFLGIKLNQKQYTGKKDYLLPCMEATLIHQSITGLYETRIDLSKLGGD

SEQ ID NO: 1208 - protein, 1345 aa, Streptococcus mutans; identical to SEQ ID NO: 1205

SEQ ID NO: 1209 - protein, 1350 aa, Streptococcus mutans; identical to SEQ ID NO: 1206

SEQ ID NO: 1210 - protein, 1350 aa, Streptococcus mutans; identical to SEQ ID NO: 1207

SEQ ID NO: 1211 - protein, 1345 aa, Streptococcus mutans
MKKPYSIGLDIGTNSVGWAVVTDDYKVPAKKMKVLGNTDKSHIKKNLLGALLFDSGNTAADRRLKRTARRRYTRRRNRILYLQEIFAEEMSKVDDSFFHRLEDSFLVTEDKRGERHPIFGNLEEEVKYHENFPTIYHLRQYLADNPEKVDLRLVYLALAHIIKFRGHFLIEGKFDTRNNDVQRLFQEFLAVYDNTFENSSLQEQNVQVEEILTDKISKSAKKDRVLKLFPNEKSNGRFAEFLKLIVGNQADFKKHFELEEKAPLQFSKDTYEEELEVLLTQIGDNYAELFLSAKKLYDSILLSGILTVTDVSTKAPLSASMIQRYNEHQMDLAQLKQFIRQKLSDKYNEVFSDVSKDGYAGYIDGKTNQEAFYKYLKGLLNKIEGSGYFLDKIEREDFLRKQRTFDNGSIPHQIHLQEMRAIIRRQAEFYPFLADNQDRIEKILTFRIPYYVGPLARGKSDFAWLSRKSADKITPWNFDEIVDKESSAEAFINRMTNYDLYLPNQKVLPKHSLLYEKFTVYNELTKVKYKTEQGKTAFFDANMKQEIFDGVFKVYRKVTKDKLMDFLEKEFDEFRIVDLTGLDKENKAFNASYGTYHDLRKILDKDFLDNSKNEKILEDIVLTLTLFEDREMIRKRLENYSDLLTKEQVKKLERRHYTGWGRLSAELIHGIRNKESRKTLLDYLIDDGNSNRNFMQLINDDALSFKEEIAKAQVIGETDNLNQVVSDIAGSPAIKKGILQSLKIVDELVKIMGHQPENIVVEMARENQFTNQGRRNSQQRLKGLTDSIKEFGSQILKEHPVENSQLQNDRLFLYYLQNGRDMYTGEELDIDYLSQYDIDHIIPQAFIKDNSIDNRVLTSSKENRGKSDDVPSKDVVRKMKPYWSKLLSAKLITQRKFDNLTKAERGGLTDDDKAGFIKRQLVETRQITKHVARILDERFNTETDENNKKIRQVKIVTLKSNLVSNFRKEFELYKVREINDYHHAHDAYLNAVIGKALLGVYPQLEPEFVYGDYPHFHGHEENKATAKKFFYSNIMNFFKKDDVRTDKNGEIIWKKDEHISNIKKVLSYPQVNIVKKVEEQTGGFSKESILPKGNSDKLIPRKTKKFYWDTKKYGGFDSPIVAYSILVIADIEKGKSKKLKTVKALVGVTIMEKMTFERDPVAFLERKGYRNVQEENIIKLPKYSLFKLENGRKRLLASARELQKGNEIVLPNHLGTLLYHAKNIHKVDEPKHLDYVDKHKDEFKELLDVVSNFSKKYTLAEGNLEKIKELYAQNNGEDLKELSSSFINLLTFTAIGAPAAFKFFDKNIDRKRYTSTTEILNATLIHQSITGLYETRIDLSKLGGD

SEQ ID NO: 1212 - protein, 1345 aa, Streptococcus mutans
MKKPYSIGLDIGTNSVGWAVVTDDYKVPAKKMKVLGNTDKSHIKKNLLGALLFDSGNTAADRRLKRTARRRYTRRRNRILYLQEIFAEEMSKVDDSFFHRLEDSFLVTEDKRGERHPIFGNLEEEVKYHENFPTIYHLRQYLADNPEKVDLRLVYLALAHIIKFRGHFLIEGKFDTRNNDVQRLFQEFLAVYDNTFENSSLQEQNVQVEEILTDKISKSAKKDRVLKLFPNEKSNGRFAEFLKLIVGNQADFKKHFELEEKAPLQFSKDTYEEELEVLLAQIGDNYAELFLSAKKLYDSILLSGILTVTDVSTKAPLSASMIQRYNEHQMDLAQLKQFIRQKLSDKYNEVFSDVSKDGYAGYIDGKTNQEAFYKYLKGLLNKIEGSGYFLDKIEREDFLRKQRTFDNGSIPHQIHLQEMRAIIRRQAEFYPFLADNQDRIEKILTFRIPYYVGPLARGKSDFAWLSRKSADKITPWNFDEIVDKESSAEAFINRMTNYDLYLPNQKVLPKHSLLYEKFTVYNELTKVKYKTEQGKTAFFDANMKQEIFDGVFKVYRKVTKDKLMDFLEKEFDEFRIVDLTGLDKENKAFNASYGTYHDLRKILDKDFLDNSKNEKILEDIVLTLTLFEDREMIRKRLENYSDLLTKEQVKKLERRHYTGWGRLSAELIHGIRNKESRKTILDYLIDDGNSNRNFMQLINDDALSFKEEIAKAQVIGETDNLNQVVSDIAGSPAIKKGILQSLKIVDELVKIMGHQPENIVVEMARENQFTNQGRRNSQQRLKGLTDSIKEFGSQILKEHPVEHSQLQNDRLFLYYLQNGRDMYTGEELDIDYLSQYDIDHIIPQAFIKDNSIDNRVLTSSKENRGKSDDVPSKNVVRKMKSYWSKLLSAKLITQRKFDNLTKAERGGLTDDDKAGFIKRQLVETRQITKHVARILDERFHTETDENNKKIRQVKIVTLKSNLVSNFRKEFELYKVREINDYHHAHDAYLNAVIGKALLGVYPQLEPEFVYGDYPHFHGHKENKATAKKFFYSNIMNFFKKDDVRTDKNGEIIWKKDEHISNIKKVLSYPQVNIVKKVEEQTGGFSKESILPKGNSDKLIPRKTKKFYWDTKKYGGFDSPIVAYSILVIADIEKGKSKKLKTVKALVGVTIMEKMTFERDPVAFLERKGYRNVQEENIIKLPKYSLFKLENGRKRLLASARELQKGNEIVLPNHLGTLLYHAKNIHKVDEPKHLDYVDKHKDEFKELLDVVSNFSKKYTLAEGNLEKIKELYAQNNGEDLKELASSFINLLTFTAIGAPATFKFFDKNIDRKRYTSTTEILNATLIHQSITGLYETRIDLSKLGGD

SEQ ID NO: 1213 - protein, 1345 aa, Streptococcus mutans
MKKPYSIGLDIGTNSVGWAVVTDDYKVPAKKMKVLGNTDKSHIKKNLLGALLFDSGNTAADRRLKRTARRRYTRRRNRILYLQEIFAEEMSKVDDSFFHRLEDSFLVTEDKRGERHPIFGNLEEEVKYHENFPTIYHLRQYLADNPEKVDLRLVYLALAHIIKFRGHFLIEGKFDTRNNDVQRLFQEFLAVYDNTFENSSLQEQNVQVEEILTDKISKSAKKDRVLKLFPNEKSNGRFAEFLKLIVGNQADFKKHFELEEKAPLQFSKDTYEEELEVLLAQIGDNYAELFLSAKKLYDSILLSGILTVTDVSTKAPLSASMIQRYNEHQMDLAQLKQFIRQKLSDKYNEVFSDVSKDGYAGYIDGKTNQEAFYKYLKGLLNKIEGSGYFLDKIEREDFLRKQRTFDNGSIPHQIHLQEMRAIIRRQAEFYPFLADNQDRIEKILTFRIPYYVGPLARGKSDFAWLSRKSADKITPWNFDEIVDKESSAEAFINRMTNYDLYLPNQKVLPKHSLLYEKFTVYNELTKVKYKTEQGKTAFFDANMKQEIFDGVFKVYRKVTKDKLMDFLEKEFDEFRIVDLTGLDKENKVFNASYGTYHDLCKILDKDFLDNSKNEKILEDIVLTLTLFEDREMIRKRLENYSDLLTKEQVKKLERRHYTGWGRLSAELIHGIRNKESRKTILDYLIDDGNSNRNFMQLINDDALSFKEEIAKAQVIGETDNLNQVVSDIAGSPAIKKGILQSLKIVDELVKIMGHQPENIVVEMARENQFTKQGRRNSQQRLKGLTDSIKEFGSQILKEHPVENSQLQNDRLFLYYLQNGRDMYTGEELDIDYLSQYDIDHIIPQAFIKDNSIDNRVLTSSKENRGKSDDVPSKDVVRKMKSYWSKLLSAKLITQRKFDNLTKAERGGLTDDDKAGFIKRQLVETRQITKHVARILDERFYTETDENNKKIRQVKIVTLKSNLVSNFRKEFELYKVREINDYHHAHDAYLNAVIGKALLGVYPQLEPEFVYGDYPHFHGHKENKATAKKFFYSNIMNFFKKDDVRTDKNGEIIWKKDEHISNIKKVLSYPQVNIVKKVEEQTGGFSKESILPKGNSDKLIPRKTKKFYWDTKKYGGFDSPIVAYSILVIADIEKGKSKKLKTVKALVGVTIMEKMTFERDPVAFLERKGYRNVQEENIIKLPKYSLFKLENGRKRLLASARELQKGNEIVLPNHLGTLLYHAKNIHKVDEPKHLDYVDKHKDEFKELLDVVSNFSKKYTLAEGNLEKIKELYAQNNGEDLKELASSFINLLTFTAIGAPATFKFFDKNIDRKRYTSTTEILNATLIHQSITGLYETRIDLSKLGGD

SEQ ID NO: 1214 - protein, 1345 aa, Streptococcus mutans
MKKPYSIGLDIGTNSVGWAVVTDDYKVPAKKMKVLGNTDKSHIKKNLLGALLFDSGNTAADRRLKRTARRRYTRRRNRILYLQEIFAEEMSKVDDSFFHRLEDSFLVTEDKRGERHPIFGNLEEEVKYHENFPTIYHLRQYLADNPEKVDLRLVYLALAHIIKFRGHFLIEGKFDTRNNDVQRLFQEFLAVYDNTFENSSLQEQNVQVEEILTDKISKSAKKDRVLKLFPNEKSNGRFAEFLKLIVGNQADFKKHFELEEKAPLQFSKDTYEEELEVLLAQIGDNYAELFLSAKKLYDSILLSGILTVTDVSTKAPLSASMIQRYNEHQMDLAQLKQFIRQKLSDKYNEVFSDVSKDGYAGYIDGKTNQEAFYKYLKGLLNKIEGSGYFLDKIEREDFLRKQRTFDNGSIPHQIHLQEMRAIIRRQAEFYPFLADNQDRIEKILTFRIPYYVGPLARGKSDFAWLSRKSADKITPWNFDEIVDKESSAEAFINRMTNYDLYLPNQKVLPKHSLLYEKFTVYNELTKVKYKTEQGKTAFFDANMKQEIFDGVFKVYRKVTKDKLMDFLEKEFDEFRIVDLTGLDKENKAFNASYGTYHDLRKILDKDFLDNSKNEKILEDIVLTLTLFEDREMIRKRLENYSDLLTKEQVKKLERRHYTGWGRLSAELIHGIRNKESRKTILDYLIDDGNSNRNFMQLINDDALSFKEEIAKAQVIGETDNLNQVVSDIAGSPAIKKGILQSLKIVDELVKIMGHQPENIVVEMARENQFTNQGRRNSQQRLKGLTDSIKEFGSQILKEHPVENSQLQNDRLFLYYLQNGRDMYTGEELDIDYLSQYDIDHIIPQAFIKDNSIDNRVLTSSKENRGKSDDVPSKNVVRKMKSYWSKLLSAKLITQRKFDNLTKAERGGLTDDDKAGFIKRQLVETRQITKHVARILDERFHTETDENNKKIRQVKIVTLKSNLVSNFRKEFELYKVREINDYHHAHDAYLNAVIGKALLGVYPQLEPEFVYGDYPHFHGHKENKATAKKFFYSNIMNFFKKDDVRTDKNGEIIWKKDEHISNIKKVLSYPQVNIVKKVEEQTGGFSKESILPKGNSDKLIPRKTKKFYWDTKKYGGFDSPIVAYSILVIADIEKGKSKKLKTVKALVGVTIMEKMTFERDPVAFLERKGYRNVQEENIIKLPKYSLFKLENGRKRLLASARELQKGNEIVLPNHLGTLLYHAKNIHKVDEPKHLDYVDKHKDEFKELLDVVSNFSKKYTLAEGNLEKIKELYAQNNGEDLKELSSSFINLLTFTAIGAPAAFKFFDKNIDRKRYTSTTEILNATLIHQSITGLYETRIDLSKLGGD

SEQ ID NO: 1215 - protein, 1345 aa, Streptococcus mutans; identical to SEQ ID NO: 1211

SEQ ID NO: 1216 - protein, 1345 aa, Streptococcus mutans; identical to SEQ ID NO: 1212

SEQ ID NO: 1217 - protein, 1345 aa, Streptococcus mutans; identical to SEQ ID NO: 1213

SEQ ID NO: 1218 - protein, 1345 aa, Streptococcus mutans; identical to SEQ ID NO: 1214

SEQ ID NO: 1219 - protein, 1345 aa, Streptococcus mutans; identical to SEQ ID NO: 1212

SEQ ID NO: 1220 - protein, 1345 aa, Streptococcus mutans; identical to SEQ ID NO: 1212

SEQ ID NO: 1221 - protein, 1345 aa, Streptococcus mutans; identical to SEQ ID NO: 1212

SEQ ID NO: 1222 - protein, 1345 aa, Streptococcus mutans; identical to SEQ ID NO: 1212

SEQ ID NO: 1223 - protein, 1359 aa, Streptococcus mutans
MKKPYSIGLDIGTNSVGWAVVTDDYKVPAKKMKVLGNTDKSHIKKNLLGALLFDSGNTAEDRRLKRTARRRYTRRRNRILYLQEIFAEEMMQVDESFFQRLDDSFLVEEDKRGSRYPIFGTLKEEKKYHKEFKTIYHLREKLANSTEKADLRLVYLSLAHMIKFRGHFLIEGQLKAENTNVQALFKDFVEVYDKTVEESHLSEMTVDALSILTEKVSKSRRLENLVECYPTEKKNTLFGNLIALSLGLQPNFKTNFQLSEDAKLQFSKDTYEEDLEGLLGEIGDEYADLFASAKNLYDAILLSGILAVDDNTTKAPLSASMVKRYKEHKEELAAFKRFIKEKLPKKYEEIFKDDTKNGYAGYVGADKKLRKRSGKLATEEEFYKYVKGILNKVEGADVWLDKIDREDFLRKQRTFDNGSIPHQIHLQEMHAILRRQGEHYPFLKENQDKIEKILTFRIPYYVGPLVRKGSRFAWAEYKADEKITPWNFDDILDKEKSAEKFITRMTLNDLYLPEEKVLPKHSLLYETFTVYNELTKVKYVNEQGEAKFFDANMKQEIFDHVFKENRKVTKDKLLNYLNKEFEEFRIVNLTGLDKENKVFNSSLGTYHDLRKILNKSFLDNKENEQIIEDIIQTLTLFEDREMIRQRLQKYSDIFTKAQLKKLERRHYTGWGRLSYKLINGIRDKQSNKTILGYLIDDGYSNRNFMQLINDDALSFKEEIAKAQVIGEMDGLNQVVSDIAGSPAIKKGILQSLKIVDELVKVMGHNPANIVIEMARENQTTAKGRRSSQKRYKRLEEAIKNLDHDLNHKILKEHPTDNQALQNDRLFLYYLQNGRDMYTEDPLDINRLSDYDIDHIIPQAFIKDNSIDNRVLTRSDKNRGKSDDVPSEEVVHKMKPFWSKLLSAKLITQRKFDNLTKAERGGLTDDDKAGFIKRQLVETRQITKHVARILDERFNTETDENNKKIRQVKIVTLKSNLVSNFRKEFELYKVREINDYHHAHDAYLNAVIGKALLGVYPQLEPEFVYGDYPHFHGHKENKATAKKFFYSNIMNFFKKGDVRTDKNGEIIWKKDEHISNIKKVLSYPQVNIVKKVEEQTGGFSKESILPKGNSDKLIPRKTKKFYWDTKKYGGFDSPIVAYSILVIADIEKGKSKKLKTVKALVGVTIMEKMTFERDPVAFLERKGYRNVQEENIIKLPKYSLFKLENGRKRLLASARELQKGNEIVLPNHLETLLYHAKNIHKVDEPKHLDYVDKHKDEFKELLDVVSNFSKKYTLAEGNLEKIKELYAQNNGEDLKELASSFINLLTFTAIGAPAAFKFFDKNIDRKRYTSTTEILNATLIHQSITGLYETRIDLNKLGGD

SEQ ID NO: 1224 - protein, 1359 aa, Streptococcus mutans; identical to SEQ ID NO: 1223

SEQ ID NO: 1225 - protein, 1355 aa, Streptococcus mutans
MKKPYSIGLDIGTNSVGWAVVTDDYKVPAKKMKVLGNTDKSHIKKNLLGALLFDSGNTAEDRRLKRTARRRYTRRRNRILYLQEIFAEEMSKVDDSFFHRLDESFLTDDDKNFDSHPIFGNKAEEDAYHQKFPTIYHLRKHLADSTEKADLRLVYLALAHMIKFRGHFLIEGELNAENTDVQKLFADFVGVYDRTFDDSHLSEITVDASSILTEKISKSRRLEKLINNYPKEKKNTLFGNLIALSLGLQPNFKTNFKLSEDAKLQFSKDTYEEDLEELLGKIGDDYADLFTLAKNLYDAILLSGILTADDSSTKAPLSASMIKRYAEHHEDLEKLKEFIKANKPELYHDIFKDETKNGYAGYIENGVKQDEFYKYLKNTLSKITGSDYFLDQIEREDFLRKQRTFDNGSIPHQIHLQEMHAILRRQGDYYPFLKENQDRIEKILTFRIPYYVGPLARKNSRFAWAEYHSDEAVTPWNFDQVIDKESSAQAFIEHMTNNDLYLPNEKVLPKHSPLYEKYTVYNELTKIKYVTEIGEAKFFDANLKQEIFDGLFKHERKVTKKKLRTFLDKNFDEFRIVDIQGLDKETETFNASYATYQDLLKVIKDKVFMDNPENAEILENIVLTLTLFEDREMIKQRLAKYADVFDKKVIDQLARRHYTGWGRLSAKLLNGIRDKQSCKTIMDYLIDDAQSNRNLMQLITDDNLTFKDDIVKAQYVDNSDDLHQVVQSLAGSPAIKKGILQSLKIVDELVKVMGKEPEQIVVEMARENQTTAKGRRNSQQRYKRLKEAIKSLDRDLNHKILKEHPTDNQALQNNRLFLYYLQNGRDMYTGESLDINRLSDYDIDHVIPQAFIKDNSIDNRVLTSSKANRGKSDDVPSEDVVNRMRPFWNKLLSSGLISQRKYNNLTKKELTLDDKAGFIKRQLVETRQITKHVARMLDERFNKEFDDNNKRIRRVKIVTLKSNLVSSFRKEFELYKVREINDYHHAHDAYLNAVVVKALLVKYPKLEPEFVYGEYPKYNSYRERKTATQKMFFYSNIMNMFKSKVKLADDQIVERPMIEVNDETGEIAWDKTKHITTVKKVLSYPQVNIVKKVEEQTIGQNGGLFDDNPKSPLEVIPSKLVPLKKALNPEKYGGYQKPTTAYPILLIVDTKQLIPISVMDKKRFEQNPVKFLKDKGYQQIEKNNFVKLPKYTLVDIGNGIKRLWASSKEVHKGNQLVVSKKSQDLLYHAHHLDNDYSNEYVKNHYQQFDILFNEITSFSKKCKLGKEHIQKIEEAYSKERDFASIEELADGFIKLLGFTQLGATSPFSFLGIKLNQKQYTGKKDYLLPCMEATLIHQSITGLYETRIDLSKLGGD

SEQ ID NO: 1226 - protein, 1355 aa, Streptococcus mutans; identical to SEQ ID NO: 1225

SEQ ID NO: 1227 - protein, 1345 aa, Streptococcus mutans
MKKPYSIGLDIGTNSVGWAVVTDDYKVPAKKMKVLGNTDKSHIKKNLLGALLFDSGNTAEDRRLKRTARRRYTRRRNRILYLQEIFSEEMDKVDDSFFHRLEDSFLVTEDKRGERHPIFGNLEEEVKYHENFPTIYHLRQYLADNPEKVDLRLVYLALAHIIKFRGHFLIEGKFDTRNNDVQRLFQEFLAVYDNTFENSSLQEQNVQVEEILTDKISKSAKKDRVLKLFPNEKSNGRFAEFLKLIVGNQADFKKHFELEEKAPLQFSKDTYEEELEVLLAQIGDNYAELFLSAKKLYDSILLSGILTVTDVSTKAPLSASMIQRYNEHQMDLAQLKQFIRQKLSDKYNEVFSDVSKDGYAGYIDGKTNQEAFYKYLKGLLNKIEGSGYFLDKIEREDFLRKQRTFDNGSIPHQIHLQEMRAIIRRQAEFYPFLADNQDRIEKILTFRIPYYVGPLARGKSDFAWLSRKSADKITPWNFDEIVDKESSAEAFINRMTNYDLYLPNQKVLPKHSLLYEKFTVYNELTKVKYKTEQGKTAFFDANMKQEIFDGVFKVYRKVTKDKLMDFLEKEFDEFRIVDLTGLDKENKVFNASYGTYHDLCKILDKDFLDNSKNEKILEDIVLTLTLFEDREMIRKRLENYSDLLTKEQVKKLERRHYTGWGRLSAELIHGIRNKESRKTILDYLIDDGNSNRNFMQLINDDALSFKEEIAKAQVIGETDNLNQVVSDIAGSPAIKKGILQSLKIVDELVKIMGHQPENIVVEMARENQFTKQGRRNSQQRLKGLTDSIKEFGSQILKEHPVENSQLQNDRLFLYYLQNGRDMYTGEELDIDYLSQYDIDHIIPQAFIKDNSIDNRVLTSSKENRGKSDDVPSKDVVRKMKSYWSKLLSAKLITQRKFDNLTKAERGGLTDDDKAGFIKRQLVETRQITKHVARILDERFYTETDENNKKIRQVKIVTLKSNLVSNFRKEFELYKVREINDYHHAHDAYLNAVIGKALLGVYPQLEPEFVYGDYPHFHGHKENKATAKKFFYSNIMNFFKKDDVRTDKNGEIIWKKDEHISNIKKVLSYPQVNIVKKVEEQTGGFSKESILPKGNSDKLIPRKTKKFYWDTKKYGGFDSPIVAYSILVIADIEKGKSKKLKTVKALVGVTIMEKMTFERDPVAFLERKGYRNVQEENIIKLPKYSLFKLENGRKRLLASARELQKGNEIVLPNHLGTLLYHAKNIHKVDEPKHLDYVDKHKDEFKELLDVVSNFSKKYTLAEGNLEKIKELYAQNNGEDLKELASSFINLLTFTAIGAPATFKFFDKNIDRKRYTSTTEILNATLIHQSITGLYETRIDLSKLGGD

SEQ ID NO: 1228 - protein, 1345 aa, Streptococcus mutans; identical to SEQ ID NO: 1227

SEQ ID NO: 1229 - protein, 1345 aa, Streptococcus mutans
MKKPYSIGLDIGTNSVGWAVVTDDYKVPAKKMKVLGNTDKSHIKKNLLGALLFDSGNTAEDRRLKRTARRRYTRRRNRILYLQEIFSEEMGKVDDSFFHRLDESFLTDDDKNFDSHPIFGNKAEEDAYHQKFPTIYHLRKHLADSTEKADLRLVYLALAHMIKFRGHFLIEGELNAENTDVQKLFADFVGVYDRTFDDSHLSEITVDASSILTEKISKSRRLEKLINNYPKEKKNTLFGNLIALSLGLQPNFKTNFKLSEDAKLQFSKDTYEEELEVLLAQIGDNYAELFLSAKKLYDSILLSGILTVTDVSTKAPLSASMIQRYNEHQMDLAQLKQFIRQKLSDKYNEVFSDVSKDGYAGYIDGKTNQEAFYKYLKGLLNKIEGSGYFLDKIEREDFLRKQRTFDNGSIPHQIHLQEMRAIIRRQAEFYPFLADNQDRIEKILTFRIPYYVGPLARGKSDFAWLSRKSADKITPWNFDEIVDKESSVEAFINRMTNYDLYLPNQKVLPKHSLLYEKFTVYNELTKVKYKTEQGKTAFFDANMKQEIFDGVFKVYRKVTKDKLMDFLEKEFDEFRIVDLTGLDKENKAFNASYGTYHDLRKILDKDFLDNSKNEKILEDIVLTLTLFEDREMIRKRLKNYSDLLTKEQLKKLERRHYTGWGRLSAELIHGIRNKESRKTILDYLIDDGNSNRNFMQLINDDALSFKEEIAKAQVIGETDNLNQVVSDIAGSPAIKKGILQSLKIVDELVKIMGHQPENIVVEMARENQFTNQGRRNSQQRLKGLTDSIKEFGSQILKEHPVENSQLQNDRLFLYYLQNGRDMYTGEELDIDYLSQYDIDHIIPQAFIKDNSIDNRVLTSSKENRGKSDDVPSKDVVRKMKSYWSKLLSAKLITQRKFDNLTKGERGGLTDDDKAGFIKRQLVETRQITKHVARILDERFNTETDENNKKIRQVKIVTLKSNLVSNFRKEFELYKVREINDYHHAHDAYLNAVIGKALLGVYPQLEPEFVYGDYPHFHGHKENKATAKKFFYSNIMNFFKKDDVRTDKNGEIIWKKDEYISNIKKVLSYPQVNIVKKVEEQTGGFSKESILPKGDSDKLIPRKTKKFYWDTKKYGGFDSPIVAYSILVIADIEKGKSKKLKTVKALVGVTIMEKMTFERDPVAFLERKGYRNVQEENIIKLPKYSLFKLENGRKRLLASARELQKGNEIVLPNHLGTLLYHAKNIHKVDEPKHLDYVDKHKDEFKELLDVVSNFSKKYTLAEGNLEKIKELYAQNNGEDLKELASSFINLLTFTAIGAPATFKFFDKNIDRKRYTSTTEILNATLIHQSITGLYETRIDLSKLGGD

SEQ ID NO: 1230 - protein, 1345 aa, Streptococcus mutans
MKKPYSIGLDIGTNSVGWAVVTDDYKVPAKKMKVLGNTDKSHIKKNLLGALLFDSGNTAEDRRLKRTARRRYTRRRNRILYLQEIFSEEMGKVDDSFFHRLDESFLTDDDKNFDSYPIFGNKAEEDAYHQKFPTIYHLRKHLADSTEKADLRLVYLALAHMIKFRGHFLIEGELNAENTDVQKLFADFVGVYDRTFDDSHLSEITVDASSILTEKISKSRRLEKLINNYPKEKKNTLFRNLVALSLGLQPNFKTNFKLSEDAKLQFSKDTYEEDLEELLGKIGDDYADLFTLAKNLYDAILLSGILTADDSSTKAPLSASMIKRYAEHHEDLEKLKEFIKANKPELYHDIFKDETKNGYAGYIENGVKQDEFYKYLKNTLSKIAGSDYFLDKIEREDFLRKQRTFDNGSIPHQIHLQEMHAILRRQGDYYPFLKENQDRIEKILTFRIPYYVGPLARGKSDFAWLSRKSADKITPWNFDEIVDKESSVEAFINRMTNYDLYLPNQKVLPKHSLLYEKFTVYNELTKVKYKTEQGKTAFFDANMKQEIFDGVFKVYRKVTKDKLMDFLEKEFDEFRIVDLTGLDKENKAFNASYGTYHDLRKILDKDFLDNSKNEKILEDIVLTLTLFEDREMIRKRLKNYSDLLTKEQLKKLERRHYTGWGRLSAELIHGIRNKESRKTILDYLIDDGNSNRNFMQLINDDALSFKEEIAKAQVIGETDNLNQVVSDIAGSPAIKKGILQSLKIVDELVKIMGHQPENIVVEMARENQFTNQGRRNSQQRLKGLTDSIKEFGSQILKEHPVENSQLQNDRLFLYYLQNGRDMYTGEELDIDYLSQYDIDHIIPQAFIKDNSIDNRVLTSSKENRGKSDDVPSKDVVRKMKSYWSKLLSAKLITQRKFDNLTKGERGGLTDDDKAGFIKRQLVETRQITKHVARILDERFNTETDENNKKIRQVKIVTLKSNLVSNFRKEFELYKVREINDYHHAHDAYLNAVIGKALLGVYPQLEPEFVYGDYPHFHGHKENKATAKKFFYSNIMNFFKKDDVRTDKNGEIIWKKDEYISNIKKVLSYPQVNIVKKVEEQTGGFSKESILPKGDSDKLIPRKTKKFYWDTKKYGGFDSPIVAYSILVIADIEKGKSKKLKTVKALVGVTIMEKMTFERDPVAFLERKGYRNVQEENIIKLPKYSLFKLENGRKRLLASARELQKGNEIVLPNHLGTLLYHAKNIHKVDEPKHLDYVDKHKDEFKELLDVVSNFSKKYTLAEGNLEKIKELYAQNNGEDLKELASSFINLLTFTAIGAPATFKFFDKNIDRKRYTSTTEILNATLIHQSITGLYETRIDLSKLGGD

SEQ ID NO: 1231 - protein, 1345 aa, Streptococcus mutans; identical to SEQ ID NO: 1230

SEQ ID NO: 1232 - protein, 1345 aa, Streptococcus mutans
MKKPYSIGLDIGTNSVGWAVVTDDYKVPAKKMKVLGNTDKSHIKKNLLGALLFDSGNTAEDRRLKRTARRRYTRRRNRILYLQEIFSEEMGKVDDSFFHRLEDSFLVTEDKRGERHPIFGNLEEEVKYHENFPTIYHLRQYLADNPEKTDLRLVYLALAHIIKFGGHFLIEGKFDTRNNDVQRLFQEFLAVYDNTFENSSLQEQNVQVEEILTDKISKSAKKDRVLKLFPNEKSNGRFAEFLKLIVGNQADFKKHFELEEKAPLQFSKDIYEEELEVLLAQIGDNYAELFLSAKKLYDSILLSGILTVTDVSTKAPLSASMIQRYNEHQMDLAQLKQFIRQKLSDKYNEVFSDVSKDGYAGYIDGKTNQEAFYKYLKGLLNKIEGSGYFLDKIEREDFLRKQRTFDNGSIPHQIHLQEMRAIIRRQAEFYPFLADNQDRIEKILTFRIPYYVGPLARGKSDFAWLSRKSADKITPWNFDEIVDKESSVEAFINRMTNYDLYLPNQKVLPKHSLLYEKFTVYNELTKVKYKTEQGKTAFFDANMKQEIFDGVFKVYRKVTKDKLMDFLEKEFDEFRIVDLTGLDKENKAFNASYGTYHDLRKILDKDFLDNSKNEKILEDIVLTLTLFEDREMIRKRLKNYSDLLTKEQLKKLERRHYTGWGRLSAELIHGIRNKESRKTILDYLIDDGNSNRNFMQLINDDALSFKEEIAKAQVIGETDNLNQVVSDIAGSPAIKKGILQSLKIVDELVKIMGHQPENIVVEMARENQFTNQGRRNSQQRLKGLTDSIKEFGSQILKEHPVENSQLQNDRLFLYYLQNGRDMYTGEELDIDYLSQYDIDHIIPQAFIKDNSIDNRVLTSSKENRGKSDDVPSKNVVRKMKSYWSKLLSAKLITQRKFDNLTKAERGGLTDDDKAGFIKRQLVETRQITKHVARILDERFHTETDENNKKIRQVKIVTLKSNLVSNFRKEFELYKVREINDYHHAHDAYLNAVIGKALLGVYPQLEPEFVYGDYPHFHGHKENKATAKKFFYSNIMNFFKKDDVRTDKNGEIIWKKDEHISNIKKVLSYPQVNIVKKVEEQTGGFSKESILPKGNSDKLIPRKTKKFYWDTKKYGGFDSPIVAYSILVIADIEKGKSKKLKTVKALVGVTIMEKMTFERDPVAFLERKGYRNVQEENIIKLPKYSLFKLENGRKRLLASARELQKGNEIVLPNHLGTLLYHAKNIHKVDEPKHLDYVDKHKDEFKELLDVVSNFSKKYTLAEGNLEKIKELYAQNNGEDLKELASSFINLLTFTAIGAPATFKFFDKNIDRKRYTSTTEILNATLIHQSITGLYETRIDLSKLGGD

SEQ ID NO: 1233 - protein, 1345 aa, Streptococcus mutans; identical to SEQ ID NO: 1232

SEQ ID NO: 1234 - protein, 1345 aa, Streptococcus mutans
MKKPYSIGLDIGTNSVGWAVVTDDYKVPAKKMKVLGNTDKSHIKKNLLGALLFDSGNTAEDRRLKRTARRRYTRRRNRILYLQEIFSEEMGKVDDSFFHRLEDSFLVTEDKRGERHPIFGNLEEEVKYHENFPTIYHLRQYLADNPEKTDLRLVYLALAHIIKFRGHFLIEGKFDTRNNDVQRLFQEFLAVYDNTFENSSLQEQNVQVEEILTDKISKSAKKDRVLKLFPNEKSNGRFAEFLKLIVGNQADFKKHFELEEKAPLQFSKDIYEEELEVLLAQIGDNYAELFLSAKKLYDSILLSGILTVTDVSTKAPLSASMIQRYNEHQMDLAQLKQFIRQKLSDKYNEVFSDVSKDGYAGYIDGKTNQEAFYKYLKGLLNKIEGSGYFLDKIEREDFLRKQRTFDNGSIPHQIHLQEMRAIIRRQAEFYPFLADNQDRIEKILTFRIPYYVGPLARGKSDFAWLSRKSADKITPWNFDEIVDKESSVEAFINRMTNYDLYLPNQKVLPKHSLLYEKFTVYNELTKVKYKTEQGKTAFFDANMKQEIFDGVFKVYRKVTKDKLMDFLEKEFDEFRIVDLTGLDKENKAFNASYGTYHDLRKILDKDFLDNSKNEKILEDIVLTLTLFEDREMIRKRLKNYSDLLTKEQLKKLERRHYTGWGRLSAELIHGIRNKESRKTILDYLIDDGNSNRNFMQLINDDALSFKEEIAKAQVIGETDNLNQVVSDIAGSPAIKKGILQSLKIVDELVKIMGHQPENIVVEMARENQFTNQGRRNSQQRLKGLTDSIKEFGSQILKEHPVENSQLQNDRLFLYYLQNGRDMYTGEELDIDYLSQYDIDHIIPQAFIKDNSIDNRVLTSSKENRGKSDDVPSKNVVRKMKSYWSKLLSAKLITQRKFDNLTKAERGGLTDDDKAGFIKRQLVETRQITKHVARILDERFHTETDENNKKIRQVKIVTLKSNLVSNFRKEFELYKVREINDYHHAHDAYLNAVIGKALLGVYPQLEPEFVYGDYPHFHGHKENKATAKKFFYSNIMNFFKKDDVRTDKNGEIIWKKDEHISNIKKVLSYPQVNIVKKVEEQTGGFSKESILPKGNSDKLIPRKTKKFYWDTKKYGGFDSPIVAYSILVIADIEKGKSKKLKTVKALVGVTIMEKMTFERDPVAFLERKGYRNVQEENIIKLPKYSLFKLENGRKRLLASARELQKGNEIVLPNHLGTLLYHAKNIHKVDEPKHLDYVDKHKDEFKELLDVVSNFSKKYTLAEGNLEKIKELYAQNNGEDLKELASSFINLLTFTAIGAPATFKFFDKNIDRKRYTSTTEILNATLIHQSITGLYETRIDLSKLGGD

SEQ ID NO: 1235 - protein, 1345 aa, Streptococcus mutans
MKKPYSIGLDIGTNSVGWAVVTDDYKVPAKKMKVLGNTDKSHIKKNLLGALLFDSGNTAEDRRLKRTARRRYTRRRNRILYLQEIFSEEMGKVDDSFFHRLEDSFLVTEDKRGERHPIFGNLEEEVKYHENFPTIYHLRQYLADNPEKTDLRLVYLALAHIIKFRGHFLIEGKFDTRNNDVQRLFQEFLAVYDNTFENSSLQEQNVQVEEILTDKISKSAKKDRVLKLFPNEKSNGRFAEFLKLIVGNQADFKKHFELEEKAPLQFSKDIYEEELEVLLAQIGDNYAELFLSAKKLYDSILLSGILTVTDVSTKAPLSASMIQRYNEHQMDLAQLKQFIRQKLSDKYNEVFSDVSKDGYAGYIDGKTNQEAFYKYLKGLLNKIEGSGYFLDKIEREDFLRKQRTFDNGSIPHQIHLQEMRAIIRRQAEFYPFLADNQDRIEKILTFRIPYYVGPLARGKSDFAWLSRKSADKITPWNFDEIVDKESSVEAFINRMTNYDLYLPNQKVLPKHSLLYEKFTVYNELTKVKYKTEQGKTAFFDANMKQEIFDGVFKVYRKVTKDKLMDFLEKEFDEFRIVDLTGLDKENKAFNASYGTYHDLRKILDKDFLDNSKNEKILEDIVLTLTLFEDREMIRKRLKNYSDLLTKEQLKKLERRHYTGWGRLSAELIHGIRNKESRKTILDYLIDDGNSNRNFMQLINDDALSFKEEIAKAQVIGETDNLNQVVSDIAGSPAIKKGILQSLKIVDELVKIMGHQPENIVVEMARENQFTNQGRRNSQQRLKGLTDSIKEFGSQILKEHPVENSQLQNDRLFLYYLQNGRDMYTGEELDIDYLSQYDIDHIIPQAFIKDNSIDNRVLTSSKENRGKSDDVPSKDVVRKMKSYWSKLLSAKLITQRKFDNLTKAERGGLTDDDKAGFIKRQLVETRQITKHVARILDERFNTETDENNKKIRQVKIVTLKSNLVSNFRKEFELYKVREINDYHHAHDAYLNAVIGKALLGVYPQLEPEFVYGDYPHFHGHKENKATAKKFFYSNIMNFFKKDDVRTDKNGEIIWKKDEHISNIKKVLSYPQVNIVKKVEEQTGGFSKESILPKGNSYKLIPRKTKKFYWDTKKYGGFDSPIVAYSILVIADIEKGKSKKLKTVKALVGVTIMEKMTFERDPVAFLERKGYRNVQEENIIKLPKYSLFKLENGRKRLLASARELQKGNEIVLPNHLGTLLYHAKNIHKVDEPKHLDYVDKHKDEFKELLDVVSNFSKKYTLAEGNLEKIKELYAQNNGEDLKELASSFINLLTFTAIGAPAAFKFFDKNIDRKRYTSTTEILNATLIHQSITGLYETRIDLSKLGGD

SEQ ID NO: 1236 - protein, 1345 aa, Streptococcus mutans
MKKPYSIGLDIGTNSVGWAVVTDDYKVPAKKMKVLGNTDKSHIKKNLLGALLFDSGNTAEDRRLKRTARRRYTRRRNRILYLQEIFSEEMGKVDDSFFHRLEDSFLVTEDKRGERHPIFGNLEEEVKYHENFPTIYHLRQYLADNPEKTDLRLVYLALAHIIKFRGHFLIEGKFDTRNNDVQRLFQEFLAVYDNTFENSSLQEQNVQVEEILTDKISKSAKKDRVLKLFPNEKSNGRFAEFLKLIVGNQADFKKHFELEEKAPLQFSKDIYEEELEVLLAQIGDNYAELFLSAKKLYDSILLSGILTVTDVSTKAPLSASMIQRYNEHQMDLAQLKQFIRQKLSDKYNEVFSDVSKDGYAGYIDGKTNQEAFYKYLKGLLNKIEGSGYFLDKIEREDFLRKQRTFDNGSIPHQIHLQEMRAIIRRQAEFYPFLADNQDRIEKILTFRIPYYVGPLARGKSDFAWLSRKSADKITPWNFDEIVDKESSAEAFINRMTNYDLYLPNQKVLPKHSLLYEKFTVYNELTKVKYKTEQGKTAFFDANMKQEIFDGVFKVYRKVTKDKLMDFLEKEFDEFRIVDLTGLDKENKAFNASYGTYHDLRKILDKDFLDNSKNEKILEDIVLTLTLFEDREMIRKRLKNYSDLLTKEQLKKLERRHYTGWGRLSAELIHGIRNKESRKTILDYLIDDGNSNRNFMQLINDDALSFKEEIAKAQVIGETDNLNQVVSDIAGSLAIKKGILQSLKIVDELVKIMGHQPENIVVEMARENQFTNQGRRNSQQRLKGLTDSIKEFGSQILKEHPVENSQLQNDRLFLYYLQNGRDMYTGEELDIDYLSQYDIDHIIPQAFIKDNSIDNRVLTSSKENRGKSDDVPSKDVVRKMKSYWSKLLSAKLITQRKFDNLTKGERGGLTDDDKAGFIKRQLVETRQITKHVARILDERFNTETDENNKKIRQVKIVTLKSNLVSNFRKEFELYKVREINDYHHAHDAYLNAVIGKALLGVYPQLEPEFVYGDYPHFHGHKENKATAKKFFYSNIMNFFKKDDVRTDKNGEIIWKKDEYISNIKKVLSYPQVNIVKKVEEQTGGFFKESILPKGDSDKLIPRKTKKFYWDTKKYGGFDSPIVAYSILVIADIEKGKSKKLKTVKALVGVTIMEKMTFERDPVAFLERKGYRNVQEENIIKLPKYSLFKLENGRKRLLASARELQKGNEIVLPNHLGTLLYHAKNIHKVDEPKHLDYVDKHKDEFKELLDVVSNFSKKYTLAEGNLEKIKELYAQNNGEDLKELASSFINLLTFTAIGAPATFKFFDKNIDRKRYTSTTEILNATLIHQSITGLYETRIDLSKLGGD

SEQ ID NO: 1237 - protein, 1345 aa, Streptococcus mutans
MKKPYSIGLDIGTNSVGWAVVTDDYKVPAKKMKVLGNTDKSHIKKNLLGALLFDSGNTAEDRRLKRTARRRYTRRRNRILYLQEIFSEEMGKVDDSFFHRLEDSFLVTEDKRGERHPIFGNLEEEVKYHENFPTIYHLRQYLADNPEKTDLRLVYLALAHIIKFRGHFLIEGKFDTRNNDVQRLFQEFLAVYDNTFENSSLQEQNVQVEEILTDKISKSAKKDRVLKLFPNEKSNGRFAEFLKLIVGNQADFKKHFELEEKAPLQFSKDIYEEELEVLLAQIGDNYAELFLSAKKLYDSILLSGILTVTDVSTKAPLSASMIQRYNEHQMDLAQLKQFIRQKLSDKYNEVFSDVSKDGYAGYIDGKTNQEAFYKYLKGLLNKIEGSGYFLDKIEREDFLRKQRTFDNGSIPHQIHLQEMRAIIRRQAEFYPFLADNQDRIEKILTFRIPYYVGPLARGKSDFAWLSRKSADKITPWNFDEIVDKESSVEAFINRMTNYDLYLPNQKVLPKHSLLYEKFTVYNELTKVKYKTEQGKTAFFDANMKQEIFDGVFKVYRKVTKDKLMDFLEKEFDEFRIVDLTGLDKENKAFNASYGTYHDLRKILDKDFLDNSKNEKILEDIVLTLTLFEDREMIRKRLKNYSDLLTKEQLKKLERRHYTGWGRLSAELIHGIRNKESRKTILDYLIDDGNSNRNFMQLINDDALSFKEEIAKAQVIGETDNLNQVVSDIAGSPAIKKGILQSLKIVDELVKIMGHQPENIVVEMARENQFTNQGRRNSQQRLKGLTDSIKEFGSQILKEHPVENSQLQNDRLFLYYLQNGRDMYTGEELDIDYLSQYDIDHIIPQAFIKDNSIDNRVLTSSKENRGKSDDVPSKDVVRKMKSYWSKLLSAKLITQRKFDNLTKAERGGLTDDDKAGFIKRQLVETRQITKHVARILDERFNTETDENNKKIRQVKIVTLKSNLVSNFRKEFELYKVREINDYHHAHDAYLNAVIGKALLGVYPQLEPEFVYGDYPHFHGHKENKATAKKFFYSNIMNFFKKDDVRTDKNGEIIWKKDEHISNIKKVLSYPQVNIVKKVEEQTGGFSKESILPKGNSDKLIPRKTKKFYWDTKKYGGFDSPIVAYSILVIADIEKGKSKKLKTVKALVGVTIMEKMTFERDPVAFLERKGYRNVQEENIIKLPKYSLFKLENGRKRLLASARELQKGNEIVLPNHLGTLLYHAKNIHKVDEPKHLDYVDKHKDEFKELLDVVSNFSKKYTLAEGNLEKIKELYAQNNGEDLKELASSFINLLTFTAIGAPATFKFFDKNIDRKRYTSTTEILNATLIHQSITGLYETRIDLNKLGGD

SEQ ID NO: 1238 - protein, 1345 aa, Streptococcus mutans; identical to SEQ ID NO: 1237

SEQ ID NO: 1239 - protein, 1345 aa, Streptococcus mutans; identical to SEQ ID NO: 1234

SEQ ID NO: 1240 - protein, 1345 aa, Streptococcus mutans; identical to SEQ ID NO: 1235

SEQ ID NO: 1241 - protein, 1345 aa, Streptococcus mutans; identical to SEQ ID NO: 1236

SEQ ID NO: 1242 - protein, 1345 aa, Streptococcus mutans
MKKPYSIGLDIGTNSVGWAVVTDDYKVPAKKMKVLGNTDKSHIKKNLLGALLFDSGNTAEDRRLKRTARRRYTRRRNRILYLQEIFSEEMGKVDDSFFHRLEDSFLVTEDKRGERHPIFGNLEEEVKYHENFPTIYHLRQYLADNPEKVDLRLVYLALAHIIKFRGHFLIEGKFDTRNNDVQKLFQEFLAVYDNTFENSSLQEQNVQVEEILTDKISKSAKKDRVLKLFPNEKSNGRFAEFLKLIVGNQADFKKHFELEEKAPLQLSKDTYEEELEVLLAQIGDNYAELFLSAKKLYDSILLSGILTVTDVSTKAPLSASMIQRYNEHQMDLAQLKQFIRQKLSDKYNEVFSDVSKDGYAGYIDGKTNQEAFYKYLKGLLNKIEGSGYFLDKIEREDFLRKQRTFDNGSIPHQIHLQEMRAIIRRQAEFYPFLADNQDRIEKILTFRIPYYVGPLARGKSDFAWLSRKSADKITPWNFDEIVDKESSVEAFINRMTNYDLYLPNQKVLPKHSLLYEKFTVYNELTKVKYKTEQGKTAFFDANMKQEIFDGVFKVYRKVTKDKLMDFLEKEFDEFRIVDLTGLDKENKAFNASYGTYHDLRKILDKDFLDNSKNEKILEDIVLTLTLFEDREMIRKRLENYSDLLTKEQVKKLERRHYTGWGRLSAELIHGIRNKESRKTLLDYLIDDGNSNRNFMQLINDDALSFKEEIAKAQVIGETDNLNQVVSDIAGSPAIKKGILQSLKIVDELVKIMGHQPENIVVEMARENQFTNQGRRNSQQRLKGLTDSIKEFGSQILKEHPVENSQLQNDRLFLYYLQNGRDMYTGEELDIDYLSQYDIDHIIPQAFIKDNSIDNRVLTSSKENRGKSDDVPSKDVVRKMKSYWSKLLSAKLITQRKFDNLTKAERGGLTDDDKAGFIKRQLVETRQITKHVARILDERFNTETDENNKKIRQVKIVTLKSNLVSNFRKEFELYKVREINDYHHAHDAYLNAVIGKALLGVYPQLEPEFVYGDYPHFHGHKENKATAKKFFYSNIMNFFKKDDVRTDKNGEIIWKKDEYISNIKKVLSYPQVNIVKKVEEQTGGFSKESILPKGNSDKLIPRKTKKFYWDTKKYGGFDSPIVAYSILVIADIEKGKSKKLKTVKALVGVTIMEKMTFERDPIAFLERKGYRNVQEENIIKLPKYSLFKLENGRKRLLASARELQKGNEIVLPNHLGTLLYHAKNIHKVDEPKHLDYVDKHKDEFKELLDVVSNFSKKYTLAEGNLEKIKELYAQNNGEDLKELASSFINLLTFTAIGAPATFKFFDKNIDRKRYTSTTEILNATLIHQSITGLYETRIDLSKLGGD

SEQ ID NO: 1243 - protein, 1345 aa, Streptococcus mutans; identical to SEQ ID NO: 1242

SEQ ID NO: 1244 - protein, 1345 aa, Streptococcus mutans
MKKPYSIGLDIGTNSVGWAVVTDDYKVPAKKMKVLGNTDKSHIKKNLLGALLFDSGNTAEDRRLKRTARRRYTRRRNRILYLQEIFSEEMGKVDDSFFHRLEDSFLVTEDKRGERHPIFGNLEEEVKYHENFPTIYHLRQYLADNPEKVDLRLVYLALAHIIKFRGHFLIEGKFDTRNNDVQRLFQEFLAVYDNTFENSSLQEQNVQVEEILTDKISKSAKKDRVLKLFPNEKSNGRFAEFLKLIVGNQADFKKHFELEEKAPLQFSKDTYEEDLEELLGKIGDDYADLFTLAKNLYDAILLSGILTADDSSTKAPLSASMIQRYNEHQMDLAQLKQFIRQKLSDKYNEVFSDVSKDGYAGYIDGKTNQEAFYKYLKGLLNKIEGSGYFLDKIEREDFLRKQRTFDNGSIPHQIHLQEMRAIIRRQAEFYPFLADNQDRIEKILTFRIPYYVGPLARGKSDFAWLSRKSADKITPWNFDEIVDKESSAEAFINRMTNYDLYLPNQKVLPKHSLLYEKFTVYNELTKVKYKTEQGKTAFFDANMKQEIFDGVFKVYRKVTKDKLMDFLEKEFDEFRIVDLTGLDKENKVFNASYGTYHDLCKILDKDFLDNSKNEKILEDIVLTLTLFEDREMIRKRLENYSDLLTKEQVKKLERRHYTGWGRLSAELIHGIRNKESRKTILDYLIDDGNSNRNFMQLINDDALSFKEEIAKAQVIGETDNLNQVVSDIAGSPAIKKGILQSLKIVDELVKIMGHQPENIVVEMARENQFTNQGRRNSQQRLKGLTDSIKEFGSQILKEHPVENSQLQNDRLFLYYLQNGRDMYTGEELDIDYLSQYDIDHIIPQAFIKDNSIDNRVLTSSKENRGKSDDVPSKDVVRKMKSYWSKLLSAKLITQRKFDNLTKAERGGLTDDDKAGFIKRQLVETRQITKHVARILDERFYTETDENNKKIRQVKIVTLKSNLVSNFRKEFELYKVREINDYHHAHDAYLNAVIGKALLGVYPQLEPEFVYGDYPHFHGHKENKATAKKFFYSNIMNFFKKDDVRTDKNGEIIWKKDEHISNIKKVLSYPQVNIVKKVEEQTGGFSKESILPKGNSDKLIPRKTKKFYWDTKKYGGFDSPIVAYSILVIADIEKGKSKKLKTVKALVGVTIMEKMTFERDPVAFLERKGYRNVQEENIIKLPKYSLFKLENGRKRLLASARELQKGNEIVLPNHLGTLLYHAKNIHKVDEPKHLDYVDKHKDEFKELLDVVSNFSKKYTLAEGNLEKIKELYAQNNGEDLKELASSFINLLTFTAIGAPATFKFFDKNIDRKRYTSTTEILNATLIHQSITGLYETRIDLSKLGGD

SEQ ID NO: 1245 - protein, 1345 aa, Streptococcus mutans
MKKPYSIGLDIGTNSVGWAVVTDDYKVPAKKMKVLGNTDKSHIKKNLLGALLFDSGNTAEDRRLKRTARRRYTRRRNRILYLQEIFSEEMGKVDDSFFHRLEDSFLVTEDKRGERHPIFGNLEEEVKYHENFPTIYHLRQYLADNPEKVDLRLVYLALAHIIKFRGHFLIEGKFDTRNNDVQRLFQEFLAVYDNTFENSSLQEQNVQVEEILTDKISKSAKKDRVLKLFPNEKSNGRFAEFLKLIVGNQADFKKHFELEEKAPLQFSKDTYEEDLEELLGKIGDDYADLFTLAKNLYDAILLSGILTADDSSTKAPLSASMIQRYNEHQMDLAQLKQFIRQKLSDKYNEVFSDVSKDGYAGYIDGKTNQEAFYKYLKGLLNKIEGSGYFLDKIEREDFLRKQRTFDNGSIPHQIHLQEMRAIIRRQAEFYPFLADNQDRIEKILTFRIPYYVGPLARGKSDFAWLSRKSADKITPWNFDEIVDKESSAEAFINRMTNYDLYLPNQKVLPKHSLLYEKFTVYNELTKVKYKTEQGKTAFFDANMKQEIFDGVFKVYRKVTKDKLMDFLEKEFDEFRIVDLTGLDKENKVFNASYGTYHDLCKILDKDFLDNSKNEKILEDIVLTLTLFEDREMIRKRLENYSDLLTKEQVKKLERRHYTGWGRLSAELIHGIRNKESRKTILDYLIDDGNSNRNFMQLINDDALSFKEEIAKAQVIGETDNLNQVVSDIAGSPAIKKGILQSLKIVDELVKIMGHQPENIVVEMARENQFTNQGRRNSQQRLKGLTDSIKEFGSQILKEHPVENSQLQNDRLFLYYLQNGRDMYTGEELDIDYLSQYDIDHIIPQAFIKDNSIDNRVLTSSKENRGKSDDVPSKDVVRKMKPYWSKLLSAKLITQRKFDNLTKAERGGLTDDDKAGFIKRQLVETRQITKHVARILDERFNTETDENNKKIRQVKIVTLKSNLVSNFRKEFELYKVREINDYHHAHDAYLNAVIGKALLGVYPQLEPEFVYGDYPHFHGHEENKATAKKFFYSNIMNFFKKDDVRTDKNGEIIWKKDEHISNIKKVLSYPQVNIVKKVEEQTGGFSKESILPKGNSDKLIPRKTKKFYWDTKKYGGFDSPIVAYSILVIADIEKGKSKKLKTVKALVGVTIMEKMTFERDPVAFLERKGYRNVQEENIIKLPKYSLFKLENGRKRLLASARELQKGNEIVLPNHLGTLLYHAKNIHKVDEPKHLDYVDKHKDEFKELLDVVSNFSKKYTLAEGNLEKIKELYAQNNGEDLKELASSFINLLTFTAIGAPATFKFFDKNIDRKRYTSTTEILNATLIHQSITGLYETRIDLSKLGGD

SEQ ID NO: 1246 - protein, 1345 aa, Streptococcus mutans
MKKPYSIGLDIGTNSVGWAVVTDDYKVPAKKMKVLGNTDKSHIKKNLLGALLFDSGNTAEDRRLKRTARRRYTRRRNRILYLQEIFSEEMGKVDDSFFHRLEDSFLVTEDKRGERHPIFGNLEEEVKYHENFPTIYHLRQYLADNPEKVDLRLVYLALAHIIKFRGHFLIEGKFDTRNNDVQRLFQEFLAVYDNTFENSSLQEQNVQVEEILTDKISKSAKKDRVLKLFPNEKSNGRFAEFLKLIVGNQADFKKHFELEEKAPLQFSKDTYEEELEVLLAQIGDNYAELFLSAKKLYDSILLSGILTVTDVSTKAPLSASMIQRYNEHQMDLAQLKQFIRQKLSDKYNEVFSDVSKDGYAGYIDGKTNQEAFYKYLKGLLNKIEGSGYFLDKIEREDFLRKQRTFDNGSIPHQIHLQEMRAIIRRQAEFYPFLADNQDRIEKILTFRIPYYVGPLARGKSDFAWLSRKSADKITPWNFDEIVDKESSAEAFINRMTNYDLYLPNQKVLPKHSLLYEKFTVYNELTKVKYKTEQGKTAFFDANMKQEIFDGVFKVYRKVTKDKLMDFLEKEFDEFRIVDLTGLDKENKVFNASYGTYHDLCKILDKDFLDNSKNEKILEDIVLTLTLFEDREMIRKRLENYSDLLTKEQVKKLERRHYTGWGRLSAELIHGIRNKESRKTILDYLIDDGNSNRNFMQLINDDALSFKEEIAKAQVIGETDNLNQVVSDIAGSPAIKKGILQSLKIVDELVKIMGHQPENIVVEMARENQFTKQGRRNSQQRLKGLTDSIKEFGSQILKEHPVENSQLQNDRLFLYYLQNGRDMYTGEELDIDYLSQYDIDHIIPQAFIKDNSIDNRVLTSSKENRGKSDDVPSKDVVRKMKSYWSKLLSAKLITQRKFDNLTKAERGGLTDDDKAGFIKRQLVETRQITKHVARILDERFYTETDENNKKIRQVKIVTLKSNLVSNFRKEFELYKVREINDYHHAHDAYLNAVIGKALLGVYPQLEPEFVYGDYPHFHGHKENKATAKKFFYSNIMNFFKKDDVRTDKNGEIIWKKDEHISNIKKVLSYPQVNIVKKVEEQTGGFSKESILPKGNSDKLIPRKTKKFYWDTKKYGGFDSPIVAYSILVIADIEKGKSKKLKTVKALVGVTIMEKMTFERDPVAFLERKGYRNVQEENIIKLPKYSLFKLENGRKRLLASARELQKGNEIVLPNHLGTLLYHAKNIHKVDEPKHLDYVDKHKDEFKELLDVVSNFSKKYTLAEGNLEKIKELYAQNNGEDLKELASSFINLLTFTAIGAPATFKFFDKNIDRKRYTSTTEILNATLIHQSITGLYETRIDLSKLGGD

SEQ ID NO: 1247 - protein, 1345 aa, Streptococcus mutans
MKKPYSIGLDIGTNSVGWAVVTDDYKVPAKKMKVLGNTDKSHIKKNLLGALLFDSGNTAEDRRLKRTARRRYTRRRNRILYLQEIFSEEMGKVDDSFFHRLEDSFLVTEDKRGERHPIFGNLEEEVKYHENFPTIYHLRQYLADNPEKVDLRLVYLALAHIIKFRGHFLIEGKFDTRNNDVQRLFQEFLAVYDNTFENSSLQEQNVQVEEILTDKISKSAKKDRVLKLFPNEKSNGRFAEFLKLIVGNQADFKKHFELEEKAPLQFSKDTYEEELEVLLAQIGDNYAELFLSAKKLYDSILLSGILTVTDVSTKAPLSASMIQRYNEHQMDLAQLKQFIRQKLSDKYNEVFSDVSKDGYAGYIDGKTNQEAFYKYLKGLLNKIEGSGYFLDKIEREDFLRKQRTFDNGSIPHQIHLQEMRAIIRRQAEFYPFLADNQDRIEKILTFRIPYYVGPLARGKSDFAWLSRKSADKITPWNFDEIVDKESSAEAFINRMTNYDLYLPNQKVLPKHSLLYEKFTVYNELTKVKYKTEQGKTAFFDANMKQEIFDGVFKVYRKVTKDKLMDFLEKEFDEFRIVDLTGLDKENKVFNASYGTYHDLCKILDKDFLDNSKNEKILEDIVLTLTLFEDREMIRKRLENYSDLLTKEQVKKLERRHYTGWGRLSAELIHGIRNKESRKTILDYLIDDGNSNRNFMQLINDDALSFKEEIAKAQVIGETDNLNQVVSDIAGSPAIKKGILQSLKIVDELVKIMGHQPENIVVEMARENQFTKQGRRNSQQRLKGLTDSIKEFGSQILKEHPVENSQLQNDRLFLYYLQNGRDMYTGEELDIDYLSQYDIDHIIPQAFIKDNSIDNRVLTSSKENRGKSDDVPSKDVVRKMKSYWSKLLSAKLITQRKFDNLTKAERGGLTDDDKAGFIKRQLVETRQITKHVARILDERFYTETDENNKKIRQVKIVTLKSNLVSNFRKEFELYKVREINDYHHAHDAYLNAVIGKALLGVYPQLEPEFVYGDYPHFHGHKENKATAKKFFYSNIMNFFKKDDVRTDRNGEIIWKKDEHISNIKKVLSYPQVNIVKKVEEQTGGFSKESILPKGNSDKLIPRKTKKFYWDTKKYGGFDSPIVAYSILVIADIEKGKSKKLKTVKALVGVTIMEKMTFERDPVAFLERKGYRNVQEENIIKLPKYSLFKLENGRKRLLASARELQKGNEIVLPNHLGTLLYHAKNIHKVDEPKHLDYVDKHKDEFKELLDVVSNFSKKYTLAEGNLEKIKELYAQNNGEDLKELASSFINLLTFTAIGAPATFKFFDKNIDRKRYTSTTEILNATLIHQSITGLYETRIDLSKLGGD

SEQ ID NO: 1248 - protein, 1345 aa, Streptococcus mutans
MKKPYSIGLDIGTNSVGWAVVTDDYKVPAKKMKVLGNTDKSHIKKNLLGALLFDSGNTAEDRRLKRTARRRYTRRRNRILYLQEIFSEEMGKVDDSFFHRLEDSFLVTEDKRGERHPIFGNLEEEVKYHENFPTIYHLRQYLADNPEKVDLRLVYLALAHIIKFRGHFLIEGKFDTRNNDVQRLFQEFLAVYDNTFENSSLQEQNVQVEEILTDKISKSAKKDRVLKLFPNEKSNGRFAEFLKLIVGNQADFKKHFELEEKAPLQFSKDTYEEELEVLLAQIGDNYAELFLSAKKLYDSILLSGILTVTDVSTKAPLSASMIQRYNEHQMDLAQLKQFIRQKLSDKYNEVFSDVSKDGYAGYIDGKTNQEAFYKYLKGLLNKIEGSGYFLDKIEREDFLRKQRTFDNGSIPHQIHLQEMRAIIRRQAEFYPFLADNQDRIEKILTFRIPYYVGPLARGKSDFAWLSRKSADKITPWNFDEIVDKESSAEAFINRMTNYDLYLPNQKVLPKHSLLYEKFTVYNELTKVKYKTEQGKTAFFDANMKQEIFDGVFKVYRKVTKDKLMDFLEKEFDEFRIVDLTGLDKENKVFNASYGTYHDLCKILDKDFLDNSKNEKILEDIVLTLTLFEDREMIRKRLENYSDLLTKEQVKKLERRHYTGWGRLSAELIHGIRNKESRKTILDYLIDDGNSNRNFMQLINDDALSFKEEIAKAQVIGETDNLNQVVSDIAGSPAIKKGILQSLKIVDELVKIMGHQPENIVVEMARENQFTNQGRQNSQQRLKGLTDSIKEFGSQILKEHPVENSQLQNDRLFLYYLQNGRDMYTGEELDIDYLSQYDIDHIIPQAFIKDNSIDNRVLTSSKENRGKSDDVPSEDVVRKMKSYWSKLLSAKLITQRKFDNLTKAERGGLTDDDKAGFIKRQLVETRQITKHVARILDERFYTETDENNKKIRQVKIVTLKSNLVSNFRKEFELYKVREINDYHHAHDAYLNAVIGKALLGVYPQLEPEFVYGDYPHFHGHKENKATAKKFFYSNIMNFFKKDDVRTDKNGEIIWKKDEHISNIKKVLSYPQVNIVKKVEEQTGGFSKESILPKGNSDKLIPRKTKKFYWDTKKYGGFDSPIVAYSILVIADIEKGKSKKLKTVKALVGVTIMEKMTFERDPVAFLERKGYRNVQEENIIKLPKYSLFKLENGRKRLLASARELQKGNEIVLPNHLGTLLYHAKNIHKVDEPKHLDYVDKHKDEFKELLDVVSNFSKKYTLAEGNLEKIKELYAQNNGEDLKELASSFINLLTFTAIGAPATFKFFDKNIDRKRYTSTTEILNATLIHQSITGLYETRIDLSKLGGD

SEQ ID NO: 1249 - protein, 1345 aa, Streptococcus mutans; identical to SEQ ID NO: 1248

SEQ ID NO: 1250 - protein, 1345 aa, Streptococcus mutans; identical to SEQ ID NO: 1244

SEQ ID NO: 1251 - protein, 1345 aa, Streptococcus mutans; identical to SEQ ID NO: 1245

SEQ ID NO: 1252 - protein, 1345 aa, Streptococcus mutans; identical to SEQ ID NO: 1246

SEQ ID NO: 1253 - protein, 1345 aa, Streptococcus mutans; identical to SEQ ID NO: 1247

SEQ ID NO: 1254 - protein, 1345 aa, Streptococcus mutans; identical to SEQ ID NO: 1246

SEQ ID NO: 1255 - protein, 1345 aa, Streptococcus mutans; identical to SEQ ID NO: 1246

SEQ ID NO: 1256 - protein, 1345 aa, Streptococcus mutans; identical to SEQ ID NO: 1246

SEQ ID NO: 1257 - protein, 1345 aa, Streptococcus mutans; identical to SEQ ID NO: 1247

SEQ ID NO: 1258 - protein, 1345 aa, Streptococcus mutans
MKKPYSIGLDIGTNSVGWAVVTDDYKVPAKKMKVLGNTDKSHIKKNLLGALLFDSGNTAEDRRLKRTARRRYTRRRNRILYLQEIFSEEMGKVNDSFFHRLEDSFLVTEDKRGERHPIFGNLEEEVKYHENFPTIYHLRQYLADNPEKVDLRLVYLALAHIIKFRGHFLIEGKFDTRNNDVQRLFQEFLAVYDNTFENSSLQEQNVQVEEILTDKISKSAKKDRVLKLFPNEKSNGRFAEFLKLIVGNQADFKKHFELEEKAPLQFSKDTYEEELEVLLAQIGDNYAELFLSAKKLYDSILLSGILTVTDVSTKAPLSASMIQRYNEHQMDLAQLKQFIRQKLSDKYNEVFSDVSKDGYAGYIDGKTNQEAFYKYLKGLLNKIEGSGYFLDKIEREDFLRKQRTFDNGSIPHQIHLQEMRAIIRRQAEFYPFLADNQDRIEKILTFRIPYYVGPLARGKSDFAWLSRKSADKITPWNFDEIVDKESSAEAFINRMTNYDLYLPNQKVLPKHSLLYEKFTVYNELTKVKYKTEQGKTAFFDANMKQEIFDGVFKVYRKVTKDKLMDFLEKEFDEFRIVDLTGLDKENKVFNASYGTYHDLCKILDKDFLDNSKNEKILEDIVLTLTLFEDREMIRKRLENYSDLLTKEQVKKLERRHYTGWGRLSAELIHGIRNKESRKTILDYLIDDGNSNRNFMQLINDDALSFKEEIAKAQVIGETDNLNQVVSDIAGSPAIKKGILQSLKIVDELVKIMGHQPENIVVEMARENQFTKQGRRNSQQRLKGLTDSIKEFGSQILKEHPVENSQLQNDRLFLYYLQNGRDMYTGEELDIDYLSQYDIDHIIPQAFIKDNSIDNRVLTSSKENRGKSDDVPSKDVVRKMKSYWSKLLSAKLITQRKFDNLTKAERGGLTDDDKAGFIKRQLVETRQITKHVARILDERFYTETDENNKKIRQVKIVTLKSNLVSNFRKEFELYKVREINDYHHAHDAYLNAVIGKALLGVYPQLEPEFVYGDYPHFHGHKENKATAKKFFYSNIMNFFKKDDVRTDKNGEIIWKKDEYISNIKKVLSYPQVNIVKKVEEQTGGFSKESILPKGNSDKLIPRKTKKFYWDTKKYGGFDSPIVAYSILVIADIEKGKSKKLKTVKALVGVTIMEKMTFERDPIAFLERKGYRNVQEENIIKLPKYSLFKLENGRKRLLASARELQKGNEIVLPNHLGTLLYHAKNIHKVDEPKHLDYVDKHKDEFKELLDVVSNFSKKYTLAEGNLEKIKELYAQNNGEDLKELASSFINLLTFTAIGAPAAFKFFDKNIDRKRYTSTTEILNATLIHQSITGLYETRIDLSKLGGD

SEQ ID NO: 1259 - protein, 1345 aa, Streptococcus mutans; identical to SEQ ID NO: 1258

SEQ ID NO: 1260 - protein, 1345 aa, Streptococcus mutans
MKKPYSIGLDIGTNSVGWAVVTDDYKVPAKKMKVLGNTDKSHIKKNLLGALLFDSGNTAEDRRLKRTTRRRYTRRRNRILYLQEIFSEEMGKVDDSFFHRLEDSFLVTEDKRGERHPIFGNLEEEVKYHENFPTIYHLRQYLADNPEKTDLRLVYLALAHIIKFRGHFLIEGKFDTRNNDVQRLFQEFLAVYDNTFENSSLQEQNVQVEEILTDKISKSAKKDRVLKLFPNEKSNGCFAEFLKLIVGNQADFKKHFELEEKAPLQFSKDTYEEELEVLLAQIGDNYAELFLSAKKLYDSILLSGILTVTDVSTKAPLSASMIQRYNEHQMDLTQLKQFIRQKLSDKYNEVFSDVSKDGYAGYIDGKTNQEAFYKYLKGLLNKIEGSGYFLDKIEREDFLRKQRTFDNGSIPHQIHLQEMRAIIRRQAEFYPFLADNQDRIEKLLTFRIPYYVGPLASGKSDFAWLSRKSADKITPWNFDEIVDKESSAEAFINRMTNYDLYLPNQKVLPKHSLLYEKFTVYNELTKVKYKTEQGKTAFFDANMKQEIFDGVFKVYRKVTKDKLMDFLEKEFDEFRIVDLTGLDKENKVFNASYGTYHDLCKILDKDFLDNSKNEKILEDIVLTLTLFEDREMIRKRLENYSDLLTKEQVKKLERRHYTGWGRLSAELIHGIRNKESRKTILDYLIDDGNSNRNFMQLINDDALSFKEEIAKAQVIGETDNLNQVVSDIAGSPAIKKGILQSLKIVDELVKIMGHQPENIVVEMARENQFTNQGRRNSQQRLKGLTDSIKEFGSQILKEHPVENSQLQNDRLFLYYLQNGRDMYTGEELDIDYLSQYDIDHIIPQAFIKDNSIDNRVLTSSKENRGKSDDVPSKDVVRKMKSYWSKLLSAKLITQRKFDNLTKAERGGLTDDDKAGFIKRQLVETRQITKHVARILDERFNTETDENNKKIRQVKIVTLKSNLVSNFRKEFELYKVREINDYHHAHDAYLNAVIGKALLGVYPQLEPEFVYGDYPHFHGHKENKATAKKFFYSNIMNFFKKDDVRTDKNGEIIWKKDEHISNIKKVLSYPQVNIVKKVEEQTGGFSKESILPKGNSDKLIPRKTKKFYWDTKKYGGFDSPIVAYSILVIADIEKGKSKKLKTVKALVGVTIMEKMTFERDPVAFLERKGYRNVQEENIIKLPKYSLFKLENGRKRLLASARELQKGNEIVLPNHLGTLLYHAKNIHKVDEPKHLDYVDKHKDEFKELLDVVSNFSKKYTLAEGNLEKIKELYAQNNGEDLKELASSFINLLTFTAIGAPATFKFFDKNIDRKRYTSTTEILNATLIHQSITGLYETRIDLSKLGGD

SEQ ID NO: 1261 - protein, 1345 aa, Streptococcus mutans; identical to SEQ ID NO: 1260

SEQ ID NO: 1262 - protein, 1350 aa, Streptococcus mutans
MKKPYSIGLDIGTNSVGWAVVTDDYKVPAKKMTVLGNTDKSHIKKNLLGALLFDSGNTAADRRLKRTARRRYTRRRNRILYLQEIFAEEMSKVDDSFFHRLEDSFLVTEDKRGERHPIFGNLEEEVKYHENFPTIYHLRQYLADNPEKVDLRLVYLALAHIIKFRGHFLIEGKFDTRNNDVQRLFQEFLAVYDNTFENSSLQEQNVQVEEILTDKISKSAKKDRVLKLFPNEKSNGRFAEFLKLIVGNQADFKKHFELEEKTPLQFSKDTYEEELEVLLAQIGDNYAELFLSAKKLYDSILLSGILTVTDVSTKAPLSASMIQRYNEHQMDLAQLKQFIRQKLSDKYNEVFSDVSKDGYAGYIDGKTNQEAFYKYLKGLLNKIEGSGYFLDKIEREDFLRKQRTFDNGSIPHQIHLQEMRAIIRRQAEFYPFLADNQDRIEKILTFRIPYYVGPLARGKSDFAWLSRKSADKITPWNFDEIVDKESSAEAFINRMTNYDLYLPNQKVLPKHSLLYEKFTVYNELTKVKYKTEQGKTAFFDANMKQEIFDGVFKVYRKVTKDKLMDFLEKEFDEFRIVDLTGLDKENKAFNASYGTYHDLRKILDKDFLDNSKNEKILEDIVLTLTLFEDREMIRKRLENYSDLLTKEQVKKLERRHYTGWGRLSAELIHGIRNKESRKTILDYLIDDGNSNRNFMQLINDDALSFKEEIAKAQVIGETDNLNQVVSDIAGSPAIKKGILQSLKIVDELVKIMGHQPENIVVEMARENQFTNQGRRNSQQRLKGLTDSIKEFGSQILKEHPVENSQLQNDRLFLYYLQNGRDMYTGEELDIDYLSQYDIDHIIPQAFIKDNSIDNRVLTSSKENRGKSDDVPSEDVVNRMRPFWNKLLSSGLISQRKYNNLTKKELTPDDKAGFIKRQLVETRQITKHVARMLDERFNKEFDDNNKRIRRVKIVTLKSNLVSSFRKEFELYKVREINDYHHAHDAYLNAVVVKALLVKYPKLEPEFVYGEYPKYNSYRERKTATQKMFFYSNIMNMFKSKVKLADDQIVERPMIEVNDETGEIAWDKTKHITTVKKVLSYPQVNIVKKVEEQTIGQNGGLFDDNPKSPLEVIPSKLVPLKKALNPEKYGGYQKPTTAYPILLIVDTKQLIPISVMDKKRFEQNPVKFLKDKGYQQIEKNNFVKLPKYTLVDIGNGIKRLWASSKEVHKGNQLVVSKKSQDLLYHAHHLDNDYSNEYVKNHYQQFDILFNEITSFSKKCKLGKEHIQKIEEAYSKERDSASIEELADGFIKLLGFTQLGATSPFSFLGIKLNQKQYTGKKDYLLPCMEATLIHQSITGLYETRIDLSKLGGD

SEQ ID NO: 1263 - protein, 1350 aa, Streptococcus mutans; identical to SEQ ID NO: 1262

SEQ ID NO: 1264 - protein, 1345 aa, Streptococcus mutans
MKKPYSIGLDIGTNSVGWAVVTDDYKVPDKKMKVLGNTDKSHIKKNLLGALLFDSGNTAEDRRLKRTARRRYTRRRNRILYLQEIFSEEMGKVDDSFFHRLEDSFLVTEDKRGERHPIFGNLEEEVKYHENFPTIYHLRQYLADNPEKTDLRLVYLALAHIIKFRGHFLIEGKFDTRNNDVQRLFQEFLAVYDNTFENSSLQEQNVQVEEILTDKISKSAKKDRVLKLFPNEKSNGRFAEFLKLIVGNQADFKKHFELEEKAPLQFSKDIYEEELEVLLAQIGDNYAELFLSAKKLYDSILLSGILTVTDVSTKAPLSASMIQRYNEHQMDLAQLKQFIRQKLSDKYNEVFSDVSKDGYAGYIDGKTNQEAFYKYLKGLLNKIEGSGYFLDKIEREDFLRKQRTFDNGSIPHQIHLQEMRAIIRRQAEFYPFLADNQDRIEKILTFRIPYYVGPLARGKSDFAWLSRKSADKITPWNFDEIVDKESSVEAFINRMTNYDLYLPNQKVLPKHSLLYEKFTVYNELTKVKYKTEQGKTAFFDANMKQEIFDGVFKVYRKVTKDKLMDFLEKEFDEFRIVDLTGLDKENKAFNASYGTYHDLRKILDKDFLDNSKNEKILEDIVLTLTLFEDREMIRKRLKNYSDLLTKEQLKKLERRHYTGWGRLSAELIHGIRNKESRKTILDYLIDDGNSNRNFMQLINDDALSFKEEIAKAQVIGETDNLNQVVSDIAGSPAIKKGILQSLKIVDELVKIMGHQPENIVVEMARENQFTNQGRRNSQQRLKGLTDSIKEFGSQILKEHPVENSQLQNDRLFLYYLQNGRDMYTGEELDIDYLSQYDIDHIIPQAFIKDNSIDNRVLTSSKENRGKSDDVPSKDVVRKMKSYWSKLLSAKLITQRKFDNLTKAERGGLTDDDKAGFIKRQLVETRQITKHVARILDERFYTETDENNKKIRQVKIVTLKSNLVSNFRKEFELYKVREINDYHHAHDAYLNAVIGKALLGVYPQLEPEFVYGDYPHFHGHKENKATAKKFFYSNIMNFFKKDDVRTDKNGEIIWKKDEHISNIKKVLSYPQVNIVKKVEEQTGGFSKESILPKGNSDKLIPRKTKKFYWDTKKYGGFDSPIVAYSILVIADIEKGKSKKLKTVKALVGVTIMEKMTFERDPVAFLERKGYRNVQEENIIKLPKYSLFKLENGRKRLLASARELQKGNEIVLPNHLGTLLYHAKNIHKVDEPKHLDYVDKHKDEFKELLDVVSNFSKKYTLAEGNLEKIKELYAQNNGEDLKELASSFINLLTFTAIGAPATFKFFDKNIDRKRYTSTTEILNATLIHQSITGLYETRIDLSKLGGD

SEQ ID NO: 1265 - protein, 1345 aa, Streptococcus mutans
MKKPYSIGLDIGTNSVGWAVVTDDYKVSAKKMKVLGNTDKSHIKKNLLGALLFDSGNTAEDRRLKRTARRRYTRRRNRILYLQEIFAEEMSKVDDSFFHRLEDSFLVTEDKRGERHPIFGNLEEEVKYHENFPTIYHLRQYLADNPEKVDLRLVYLALAHIIKFRGHFLIEGKFDTRNNDVQRLFQEFLAVYDNTFENSSLQEQNVQVEEILTDKISKSAKKDRVLKLFPNEKSNGRFAEFLKLIVGNQADFKKHFELEEKAPLQFSKDTYEEELEVLLAQIGDNYAELFLSAKKLYDSILLSGILTVTDVSTKAPLSASMIQRYNEHQMDLAQLKQFIRQKLSDKYNEVFSDVSKDGYAGYIDGKTNQEAFYKYLKGLLNKIEGSGYFLDKIEREDFLRKQRTFDNGSIPHQIHLQEMRAIIRRQAEFYPFLADNQDRIEKILTFRIPYYVGPLARGKSDFAWLSRKSADKITPWNFDEIVDKESSAEAFINRMTNYDLYLPNQKVLPKHSLLYEKFTVYNELTKVKYKTEQGKTAFFDANMKQEIFDGVFKVYRKVTKDKLMDFLEKEFDEFRIVDLTGLDKENKAFNASYGTYHDLRKILDKDFLDNSKNEKILEDIVLTLTLFEDREMIRKRLENYSDLLTKEQVKKLERRHYTGWGRLSAELIHGIRNKESRKTILDYLIDDGNSNRNFMQLINDDALSFKEEIAKAQVIGETDNLNQVVSDIAGSPAIKKGILQSLKIVDELVKIMGHQPENIVVEMARENQFTNQGRRNSQQRLKGLTDSIKEFGSQILKEHPVEHSQLQNDRLFLYYLQNGRDMYTGEELDIDYLSQYDIDHIIPQAFIKDNSIDNRVLTSSKENRGKSDDVPSKNVVRKMKSYWSKLLSAKLITQRKFDNLTKAERGGLTDDDKAGFIKRQLVETRQITKHVARILDERFHTETDENNKKIRQVKIVTLKSNLVSNFRKEFELYKVREINDYHHTHDAYLNAVIGKALLGVYPQLEPEFVYGDYPHFHGHKENKATAKKFFYSNIMNFFKKDDVRTDKNGEIIWKKDEHISNIKKVLSYPQVNIVKKVEEQTGGFSKESILPKGNSDKLIPRKTKKFYWDTKKYGGFDSPIVAYSILVIADIEKGKSKKLKTVKALVGVTIMEKMTFERDPVAFLERKGYRNVQEENIIKLPKYSLFKLENGRKRLLASARELQKGNEIVLPNHLGTLLYHAKNIHKVDEPKHLDYVDKHKDEFKELLDVVSNFSKKYTLAEGNLEKIKELYAQNNGEDLKELASSFINLLTFTAIGAPATFKFFDKNIDRKRYTSTTEILNATLIHQSITGLYETRIDLSKLGGD

SEQ ID NO: 1266 - protein, 1345 aa, Streptococcus mutans; identical to SEQ ID NO: 1265

SEQ ID NO: 1267 - protein, 1345 aa, Streptococcus mutans
MKKPYSIGLDIGTNSVGWSVVTDDYKVPAKKMKVLGNTDKSHIEKNLLGALLFDSGNTAEDRRLKRTARRRYTRRRNRILYLQEIFSEEMGKVDDSFFHRLEDSFLVTEDKRGERHPIFGNLEEEVKYHENFPTIYHLRQYLADNPEKVDLRLVYLALAHIIKFRGHFLIEGKFDTRNNDVQRLFQEFLAVYDNTFENSSLQEQNVQVEEILTDKISKSAKKDRVLKLFPNEKSNGRFAEFLKLIVGNQADFKKHFELEEKAPLQFSKDTYEEELEVLLAQIGDNYAELFLSAKKLYDSILLSGILTVTDVGTKAPLSASMIQRYNEHQMDLAQLKQFIRQKLSDKYNEVFSDVSKDGYAGYIDGKTNQEAFYKYLKGLLNKIEGSGYFLDKIEREDFLRKQRTFDNGSIPHQIHLQEMRAIIRRQAEFYPFLADNQDRIEKLLTFRIPYYVGPLARGKSDFAWLSRKSADKITPWNFDEIVDKESSAEAFINRMTNYDLYLPNQKVLPKHSLLYEKFTVYNELTKVKYKTEQGKTAFFDANMKQEIFDGVFKVYRKVTKDKLMDFLEKEFDEFRIVDLTGLDKENKVFNASYGTYHDLCKILDKDFLDNSKNEKILEDIVLTLTLFEDREMIRKRLENYSDLLTKEQVKKLERRHYTGWGRLSAELIHGIRNKESRKTILDYLIDDGNSNRNFMQLINDDALSFKEEIAKAQVIGETDNLNQVVSDIAGSPAIKKGILQSLKIVDELVKIMGHQPENIVVEMARENQFTNQGRRNSQQRLKGLTDSIKEFGSQILKEHPVENSQLQNDRLFLYYLQNGRDMYTGEELDIDYLSQYDIDHIIPQAFIKDNSIDNRVLTSSKENRGKSDDVPSKDVVRKMKSYWSKLLSAKLITQRKFDNLTKAERGGLTDDDKAGFIKRQLVETRQITKHVARILDERFNTETDENNKKIRQVKIVTLKSNLVSNFRKEFELYKVREINDYHHAHDAYLNAVIGKALLGVYPQLEPEFVYGDYPHFHGHKENKATAKKFFYSNIMNFFKKDDVRIDKNGEIIWKKDEHISNIKKVLSYPQVNIVKKVEEQTGGFSKESILPKGNSDKLIPRKTKKFYWDTKKYGGFDSPIVAYSILVIADIEKGKSKKLKTVKALVGVTIMEKMTFERDPVAFLERKGYRNVQEENIIKLPKYSLFKLENGRKRLLASARELQKGNEIVLPNHLGTLLYHAKNIHKVDEPKHLDYVDKHKDEFKELLDVVSNFSKKYTLAEGNLEKIKELYAQNNGEDLKELASSFINLLTFTAIGAPATFKFFDKNIDRKRYTSTTEILNATLIHQSITGLYETRIDLSKLGGD

SEQ ID NO: 1268 - protein, 1345 aa, Streptococcus mutans; identical to SEQ ID NO: 1267

SEQ ID NO: 1269 - protein, 1355 aa, Streptococcus mutans
MKKSYSIGLDIGTNSVGWAVVTDDYKVPAKKMKVLGNTDKSHIKKNLLGALLFDSGNTAEDRRLKRTARRRYTRRRNRILYLQEIFSEEMGKVDDSFFHRLDESFLTDDDKNFDSHPIFGNKAEEDAYHQKFPTIYHLRKHLADSTEKADLRLVYLALAHMIKFRGHFLIEGELNAENTDVQKLFADFVGVYDRTFDDSHLSEITVDASSILTEKISKSRRLEKLINNYPKEKKNTLFGNLIALSLGLQPNFKTNFKLSEDAKLQFSKDTYEEDLEELLGKIGDDYADLFTLAKNLYDAILLSGILTADDSSTKAPLSASMIKRYAEHHEDLEKLKEFIKANKPELYHDIFKDETKNGYAGYIENGVKQDEFYKYLKNTLSKIAGSDYFLDKIEREDFLRKQRTFDNGSIPHQIHLQEMHAILRRQGDYYPFLKENQDRIEKILTFRIPYYVGPLARKNSRFAWAEYHSDEAVMPWNFDQVIDKESSAQAFIEHMTNNDLYLPNEKVLPKHSPLYEKYTVYNELTKIKYVTEIGEAKFFDANLKQEIFDGLFKHERKVTKKKLRTFLDKNFDEFRIVDIQGLDKETETFNASYATYQDLLKVIKDKVFMDNPENAEILENIVLTLTLFEDREMIKQRLAKYADVFDKKVIDQLARRHYTGWGRLSAKLLNGIRDKQSCKTIMDYLIDDAQSNRNLMQLITDDNLTFKDDIVKAQYVDNSDDLHQVVQSLAGSPAIKKGILQSLKIVDELVKVMGKEPEQIVVEMARENQTTAKGRRNSQQRYKRLKEAIKSLDRDLNHKILKEHPTDNQALQNNRLFLYYLQNGRDMYTGESLDINRLSDYDIDHVIPQAFIKDNSIDNRVLTSSKANRGKSDDVPSEDVVNRMRPFWNKLLSSGLISQRKYNNLTKKELTPDDKAGFIKRQLVETRQITKHVARMLDERFNKEFDDNNKRIRRVKIVTLKSNLVSSFRKEFELYKVREINDYHHAHDAYLNAVVVKALLVKYPKLEPEFVYGEYPKYNSYRERKTATQKMFFYSNIMNMFKSKVKLADDQIVERPMIEVNDETGEIAWDKTKHITTVKKVLSYPQVNIVKKVEEQTIGQNGGLFDDNPKSPLEVIPSKLVPLKKALNPEKYGGYQKPTTAYPILLIVDTKQLIPISVMDKKRFEQNPVKFLKDKGYQQIEKNNFVKLPKYTLVDIGNGIKRLWASSKEVHKGNQLVVSKKSQDLLYHAHHLDNDYSNEYVKNHYQQFDILFNEITSFSKKCKLGKEHIQKIEEAYSKERDSASIEELADGFIKLLGFTQLGATSPFSFLGIKLNQKQYTGKKDYLLPCMEATLIHQSITGLYETRIDLNKLGGD

SEQ ID NO: 1270 - protein, 1355 aa, Streptococcus mutans; identical to SEQ ID NO: 1269

SEQ ID NO: 1271 - protein, 1125 aa, Streptococcus mutans
MTNGKILGLDIGIASVGVGIINAKTGNVEHASSRIFPAANADNNVERRSARGGRRLIRRKKHRLKRVEDLFEKYNIDTDFSNLNLNPYQLRVKGLNEQLSNEELFAILKNIAKRRGISYLDDAEDDSVGSSDYAKAIDENRKLLKKQTPGEIQLKRLEKYGQLRGNFTIQDENGEYHRLINVFSTSDYVKEARRILETQSYYNKFITESFVEDYIKILQGKRKYYVGPGNEKSRTDYGIYRTDGETLDNLFGILIGKCGFYPEEYRAAKASYTAQEYNFLNDLNNLTVPTETKKLSTEQKYQLVDFAKTASTLEAAKLLKEIAKLVGCQVEEIKGYRLDNKDKPDLHTFEPFRKLKSNLTTIAVENLSITTLDTLAHILTLNTEREGIEEAIQKELPNIFSDEQITGIIAVRKKNSQIFGKGWHSFSIKLMKELIPELYETSEEQMTILIRLKKVKTNSKITNRTKYINEQEVTDEIYNPVVSKSIRQTVKIINAAIKKYGAFDQIVIEMPRESNEEDERKFIADLQKSNAKEKDDAMKQAALLYNGKAELPHGVFHGHKELATKIRLWYQQGERCLYSGKHIDIHDLIHNQHMFEIDHVLPLSLSFDDSLANKVLVYSWANQEKGQRTPFQALPQMASAWSFRELRDYISKQKGISKKKRDYLLTEQDINKVEVKQKFIERNLVDTRYVSRVVLNTLQDALKVMNKETKISVIRGQFTSQLRRQWRIDKSRETYHHHAVDALIIAASSQLRLWKKQNNPMFAEDKHGQKINLDTGEVLSDDAYKELVYQAPYQGFVNTISSKSFEDEILFSYQVDSKVNRKISDATIYATRQAQLGKDKKEETYVLGKIKDIYSQAGYDAFRKKYDKDKAVFLMYQKDPETWEKVIEVILRDYKELDDKGKEIGNPFERYKVKHGFVRKYSRKNKGTEIKSLKYYDNKLGNHIDITPNNSKHSVVLQSINPWRADLYFNPETTKYELMGLKYADLSFEKGTGKYSISREKYDEIKEREGISSKSEFKFTLYKNDLILVKDIGNHKELIARFNSKNDTSKHYVELKPWNKAKFDSEEELIPAFGKVAKSGQFIKGLNKPDLSIYKVKTDILGHKYYIKKEGDKPKLNFENKIKNK

SEQ ID NO: 1272 - protein, 1125 aa, Streptococcus mutans
MTNGKILGLDIGIASVGVGIINAKTGNVEHASSRIFPAANADNNVERRSARGGRRLIRRKKHRLKRVEDLFEKYNIDTDFSNLNLNPYQLRVKGLNEQLSNEELFAILKNIAKRRGISYLDDAEDDSVGSSDYAKAIDENRKLLKKQTPGEIQLKRLEKYGQLRGNFTIQDENGEYHRLINVFSTSDYVKEARRILETQSYYNKFITESFVEDYIKILQGKRKYYVGPGNEKSRTDYGIYRTDGETLDNLFGILIGKCGFYPEEYRAAKASYTAQEYNFLNDLNNLTVPTETKKLSTEQKYQLVDFAKTASTLGAAKLLKEIAKLVGCQVEEIKGYRLDNKDKPDLHTFEPFRKLKSNLTTIAVENLSITTLDTLAHILTLNTEREGIEEAIQKELPNIFSDEQITEIIAVRKKNSQIFGKGWHSFSIKLMKELIPELYETSEEQMTILTRLKKVKTNSKITNRTKYINEEEITDEIYNPVVSKSIRQTVKIINATIKKYGAFDQIIIEMPRESNEEDERKFIADLQKSNAKEKDDAMKQAALLYNGKDELPHDVFHGHKELATKIRLWYQQGERCLYSGKHIDIHDLIHNQHMFEIDHVLPLSLSFDDSLANKVLVYSWANQEKGQRTPFQALPQMASAWSFRELRDYISKQKGISKKKRDYLLTEQDINKVEVKQKFIERNLVDTRYVSRVVLNTLQDALKVMNKETKISVIRGQFTSQLRRQWRIDKSRETYHHHAVDALIIAASSQLRLWKKQNNPMFAEDKHGQKINLDTGEVLSDDAYKELVYQAPYQGFVNTISSKSFEDEILFSYQVDSKVNRKISDATIYATRQAQLGKDKKEETYVLGKIKDIYSQAGYDAFRKKYDKDKAVFLMYQKDPETWEKVIEVILRDYKELDDKGKEIGNPFERYKVKHGFVRKYSRKNKGTEIKSLKYYDNKLGNHIDITPNNSKHSVVLQSINPWRADLYFNPETTKYELMGLKYADLSFEKGTGKYSISREKYDEIKEREGISSKSEFKFTLYKNDLILVKDIGNHKELIARFNSKNDTSKHYVELKPWNKAKFDSEEELIPAFGKVAKSGQFIKGLNKPDLSIYKVKTDILGHKYYIKKEGDKPKLNFENKIKNK

SEQ ID NO: 1273 - protein, 1125 aa, Streptococcus mutans; identical to SEQ ID NO: 1272

SEQ ID NO: 1274 - protein, 1125 aa, Streptococcus mutans; identical to SEQ ID NO: 1271

SEQ ID NO: 1275 - protein, 670 aa, Streptococcus oralis
MAKFNKNYSIGLDIGVSSVGYAVVTEDYRVPAFKFKVLGNTEKEKIKKNLIGSTTFVPAQSAQGTRVFRVNRRRIDRRNHRIAYLRDIFQKEIGKIDKNFYRRLDESFRVLGDKSEDIQIKQPFFGNKELETAYHKKYPTIYHLRKHLADADKNSPVADIREVYMALSHIFKYRGHFLTLGKIDPNNINMQNSWIDFIESCQDAFDLEISDESKTIAAIFKSSDNRQEKVKGILSYFQPELAKKDKSIFKQLLQLLFGLKTKFKECFELEEEPDLNFSKENYDENLENLLGTLEEDFPDVFAKLKILRDTILLSDMLTYTGATHARFSATMVERYEEHRKDLQRFKSFVKQNLSEQDYLDIFGRKTPNGFDVDKETKGYVGYISNKMVLTNKQKTIQQNFYDYISGKITGIEGAEYFLNKISDGTFLRKLRTTDNGTIPNQIHAYELEKIIERQGRDYPFLLENKDKLLSILTFKIPYYVGPLAKGNNSRFAWIKRTTSQDVLDNNDEDTKNGKIRPWNYHKLINMDETRDAFITNLIGNDIILLNEKVLPKRSLIYEEVMLQNELTRIKYKDKYGKIHFFDSELRQEIINNLFKTNSKRVSSAMLLAYLENFTNLQAVEIVSGIEKGKSLNSTLKTYNDLKTIFSEDLLDSEIYQKELEEIIKVITVFV

SEQ ID NO: 1276 - protein, 1373 aa, Streptococcus oralis
MENKNYSIGLDIGTNSVGWAVITDDYKVPSKKMKVLGNTDKRFIKKNLIGALLFDEGTTAEARRLKRTARRRYTRRKNRLRYLQEIFAEEMSKVDSSFFHRLDDSFLIPEDKKGSKYPIFATLIEEKEYHKQFPTIYHLRKQLADSKEKTDLRLIYLALAHMIKYRGHFLYEDTFDIKNNDIQKIFNEFISIYNNTFEGNSLSGQNVQVEAIFTDKISKSAKRERVLKLFPDEKSTGLFSEFLKLIVGNQADFKKHFDLEEKAPLQFSRDTYDEDLENLLGQIGDDFADLFVAAKKLYDAILLSGILTVTDPSTKAPLSASMIERYENHQKDLATLKQFIKTNLPEKYDEVFSDQSKDGYAGYIDGKTTQESFYKYIKNLLSKFEGADYFLEKIEREDFLRKQRTFDNGSIPHQIHLQEMNAILRRQGEHYPFLKENKEKIEKILTFRIPYYVGPLARGNRDFAWLTRNSDQAIRPWNFEEIVDKASSAESFINKMTNYDLYLPEEKVLPKHSLLYETFAVYNELTKVKFIAEGLRDYQFLDSRQKKDIFYTLFKAEDKRKVTEKDIIQYLHTVDGYDGIELKGIEKQFNASLSTYHDLLKIIKDKEFMDDPNNEEILENIVHTLTIFEDREMIKQRLAQYDSLFDEKVIKALTRRHYTGWGKLSSKLINGIRDKQTGKTILDYLMDDGYNNRNFMQLINDDELSFKEIIKKAQVVGKTDDVKQVVQELPGSPAIKKGILQSIKLVDELVKVMGHEPESIVIEMARENQTTARGKKNSQQRYKRIEDSLKILASGLNAKILKEHPTDNIQLQNDRLFLYYLQNGRDMYTGKPLDINQLSSYDIDHIVPQAFIKDDSLDNRVLTSLKDNRGKSDNVPSLEVVEKMKTFWQQLLDSKLISYRKFNNLTKAERGGLDERDKVGFIKRQLVETRQITKHVAQILDARYNTEVNEKDKKNRTVKIITLKSNLVSNFRKEFRLYKIREINDYHHAHDAYLNAVVAKAILKKYPKLEPEFVYGDYQKYDLKRYISRSKDPKEIEKATEKYFFYSNLLNFFKEEVHYADGTIVKRENIEYSKDTGEIAWNKEKDFATIKKVLSLPQVNIVKKREVQTGGFSKESILPKGNSDKLIPRKTKDILWDTTKYGGFDSPVIAYSILLIADIEKGKAKRLKTVKTLVGITIMEKATFEKSPIAFLENKGYHNVRKENILCLPKYSLFELKNGRRRMLASAKELQKGNEIVLPVHLTTLLYHAKNIHRLDEPEHLEYIQKHRNEFKGLLNLVSEFSQKYVLADANLEKIKNLYADNEQADIEILANSFINLLTFTALGAPAAFKFFGKDVDRKRYTTVSEILNATLIHQSITGLYETRIDLSKLGED

SEQ ID NO: 1277 - protein, 1371 aa, Streptococcus oralis
MENKNYSIGLDIGTNSVGWSVITDDYKVPSKKMKVLGNTDKRFIKKNLIGALLFDEGTTAEARRLKRTARRRYTRRKNRLRYLQEIFAEEMSKVDSSFFHRLDDSFLIPEDKRGSKYPIFATLAEEKEYHKQFPTIYHLRKQLADSKEKTDLRLIYLALAHMIKYRGHFLYEDTFDIKNNDIQKIFSEFISIYDNTFEGSSLSGQNAQVEAIFTDKISKSAKRERVLKLFPDEKSTGLFSEFLKLIVGNQADFKKHFDLGEKAPLQFSKDTYDEDLENLLGQIGDDFADLFLVAKKLYDAILLSGILTVTDPSTKAPLSASMIERYENHQKDLAVLKQFIKNNLPEKYDEVFSDQSKDGYAGYIDGKTTQEAFYKYIKNLLSKFEGTDYFLEKIEREDFLRKQRTFDNGSIPHQIHLQEMNAILRRQGEHYPFLKDNKEKIEKILTFRIPYYVGPLARGNRDFAWLTRNSDEAIRPWNFEEIVDKASSAEDFINKMTNYDLYLPEEKVLPKHSLLYETFAVYNELTKVKFIAEGLRDYQFLDSGQKKQIVTQLFKEKRKVTEKDIIQFLHNVDGYDGIELKGIEKQFNASLSTYHDLLKIIKDKEFMDDSKNEEILENIVHTLTIFEDREMIKQRLAQYDSLFDEKVIKALIRRHYTGWGKLSAKLIDGICDKQTGNTILDYLIDDGKNNRNFMQLINDDGLSFKEITQKAQVVGKTDDVKQVVQELPGSPAIKKGILQSIKIVDELVKVMGHTPESIVIEMARENQTTARGKKNSQQRYKRIEDALKNLASGLDSNILKEHPTNNIQLQNDRLFLYYLQNGRDMYTGKPLDINQLSSYDIDHIVPQAFIKDDSLDNRVLTSLKDNRGKSDNVPSIEVVQKRKAFWQQLLDSKLISERKFNNLTKAERGGLDERDKVGFIKRQLVETRQITKHVAQILDARFNKEVNEKDKKNRTVKIITLKSNLVSNFRKEFRLYKVREINDYHHAHDAYLNAVVAKAILKKYPKLEPEFVYGDYQKYDLKRYISRSRNPKEVEKATEKYFFYSNLLNFFKEEVHYADGTIVKRENIEYSKDTGEIAWNKEKDFATIKKVLSYPQVNIVKKREVQTGGFSKESILPKGNSDKLIPRKTKDILWETTKYGGFDSPVIAYSILLIADIEKGKAKKLKTVKTLVGITIMEKAAFEENPITFLENKGYHNVRKENILCLPKYSLFELENGRRRLLASAKELQKGNEIVLPVYLTTLLYHSKNVHKLDEPEHLEYIQKHRNEFKDLLNLVSEFSQKYVLADANLEKIQNLYADNEQADIEILANSFINLLTFTALGAPAAFKFFGKDIDRKRYTTVSEILNATLIHQSITGLYETRIDLSKLGED

SEQ ID NO: 1278 - protein, 1121 aa, Streptococcus oralis
MNGLVLGLDIGIASVGVGILEKNSGKIIHANSRLFPAATADNNVERRKNRQARRLNRRKKHRGVRFQDLFEDYGLLTDFSKVSINLNPYRLRVDGLNQQLTNEELFIALKNIVKRRGISYLDDASEDGGAVSSDYGKAVEENRKLLAEQTPGQIQLERFEKYGQVRGDFTVVENGEKCRLINVFSTSAYRKEAEKILRKQQEFNNQITDEFIEDYLKILTGKRKYYHGPGNEKSRTDYGRFRTDGTTLDNIFGVLIGKCTFYPNEYRASKSSYTAQEFNLLNDLNNLTVPTETKKLSEEQKKVIVEYAKEAKTLGASTLLKYIVKMIDASVDQISGYRVDVNNKPEMHTFEVYRKMQSLETISVGELSRNVLDELAHILTLNTEREGIEEAINSKLMGVFSQDQVLELVQFRKNNSSLFSKGWHNFSLKLMMELIPELYETSEEQMTILTRLGKQKSKETSKRTKYIDEKELTEEIYNPVVAKSVRQAIKIINEATKKHGIFDNIVIEMARENNEEDAKKDYIKRQKANQDEKNAAMEKAAFQYNGKKELPGNIFNGHKELATKIRLWHQQGEKCLYTGKTIPISDLIHNQYKYEIDHILPLSLSFDDSLSNKVLVHATANQEKGQRTPFQALDSMDDAWSYREFKSYVKDLKSLSNKKKDYLLTEEDISKIEVKQKFIERNLVDTRYSSRVVLNALQDFYKSHQFDTTISVVRGQFTSQLRRKWGLEKSRETYHHHAVDALIIAASSQLRLWKKQNNPLITYKEGQFVDSQTGEIISLTDDEYKELVFKAPYDHFVDTLHSKTFEDGILFSYQVDSKYNRKISDATIYATRKAKLDKDKSEETYVLGKIKDIYSQAGYDAFIKIYNKDKRKFLMYHKDPQTFEKVIEEILRTYPSKERNDKNKEVPCNPFEKYRQENGPIRKYSKKGNGPEIKCLKYYDNKLGNYIDISPDGSDNQVVLQSLKPWRTDVYFNHQTKEYELMGLKYSDLSFEKGSGKYSISNEKYNSIKRIEGVNEQSEFKFTLYKNDLILIKDSENNEQKLFRFNSRNDTAKHYVELKPYDKARFDGQQELITILGNVAKGGQCLKGLNKSNISIFKVKTDVLGKKHIIKKEGDEPKLKF

SEQ ID NO: 1279 - protein, 1134 aa, Streptococcus oralis
MNGLVLGLDIGIASVGVGILEKNSGKIVHASSRIFPAATADNNVERRKNRQARRLHRRKKHRGARLKDLFEYYGLLTDFSKVSINLNPYRLRVDGLDQQLTNEELFIALKNIVKRRGISYLDDASEDGGTVSSDYGKAVEENRKLLAEQTPGQIQLERFEKYGQLRGDFTVVENSEKCRLINVFSTSAYKKEAERILRKQQEFNNQITDEFIEDYLKILTGKRKYYHGPGNEKSRTDYGRFRTDGATLDNIFGILIGKCTFYPNEYRASKASYTAQEFNLLNDLNNLTVPTETKKLSEEQKKTIIEYAKSAKTLGASTLLKYIAKMIDASVDQIRGYRVDVNNKPEMHTFEVYRKMQSLETISVGELSRNILDELAHILTLNTEREGIEEAINTKLRDSFSQDQVLELVQFRKNNSSLFSKGWHNFSLKLMMELIPELYETSEEQMTILTRLGKQKSKETSKRTKYIDEKEVTEEIYNPVVAKSVRQAIKIINEATKKHGIFDNIVIEMARENNEEDAKKDYIKRQKANQDEKYAAMEKAAFQYNGKKELPDNIFHGHKELATKIRLWHQQGEKCLYTGKSIPISDLIHNQYKYEIDHILPLSLSFDDSLSNKVLVLATANQEKGQRTPFQALDSMDDAWSYREFKSYVKESKLLGNKKKEYLLTEEDISKIEVKQKFIERNLVDTRYSSRVVLNALQDFYKNHNFDTTISVVRGQFTSQLRRKWGLEKSRETYHHHAVDALIIAASSQLRLWKKQNNPLIAYKEGQFVDSQTGEIISLTDDEYKELVFKAPYDHFVDTLSSKTFEDSILFSYQVDSKFNRKISDATIYATRKAKLDKEKKEYTYTLGKIKDIYSLGTKTPSKTGFYKFLDLYNKDKSQFLMFQKDRKTWDEVIEKIMEQYRPFKEYDKAGKLVDFNPFEKYRQENGPIRKYSKKGNGPEIKSLKYYDILLGKHKNITPEGSRNTVALLSLNPWRTDVYYNMETKKYEFLGLKYADLPFEEGGAYGISTETYNELREKEGIGKNSEFKFTLYKNDLILIKDTETNCQQFFRFWSRTGKDNPKSFEKHKIELKPYEKAKFEKGEELEVLGKVPPSSNQFQKNMQIENLSIYKVKTDVLGNKHFIKKEGDKPKLKF

SEQ ID NO: 1280 - protein, 550 aa, Streptococcus oralis
MYSLDKNGSPTPLYRDQLNQYEVDHIIPYSFLPIDSIDNKVLTHRENNQRKLDNIPDKETVANMKPFWEKLYNAKLISQTKYQRLTTSERTPDGVLTESMKAGFIERQLVETRQIIKHVARILDNRFSDTKIITLKSQLVTNFRNTFHIAKIRELNDYHHAHDAYLAVVVGQTLLKAYPKLAPELIYGHHAHFNRHEENKATIRKYLYSNIMRFFNNPDSKVSKDIWDCNRDLPIIKDIIYNSQVNFVKRTMIKKGAFYNQNPVGKFNKQIAANNRYPLKTKVSSLDTSIYGGYGPMNSALSIIIIAERFNEKKCKIETVKEFHDIFIIDYKKFNNDPFQFLNDTSENGFLKKNNINRVLAFYRVPKYSLMQKIDGTRMLFESKSNLHKATQFKLTKTQNELFFHMRRLLTKSNLMDLKSESAIKESQNFILKHKEEFDNISNQLSAFSQKMLGDTTSLKNLIKGYNERKIKEINSSEETIKYFYDNFIKMFSFVKSGAPKDINDFFNNKYTVARMRPKPDKKLLNATLIHQSITGLYETRIDLSKLGED

SEQ ID NO: 1281 - protein, 1140 aa, Streptococcus parasanguinis
MNGLVLGLDIGIASVGVGILKKDIGEIIHTNSRLFSAATADSNIERRGHRGGKRLTRRKKHRSIRLHDLFEDFGLLTDFSKVSINLNPYQLRVQGLDNQLTNEELFIALKNIVKRRGISYLDDASEDGGTVSSDYGKAVEENRKLLAEQTPGQIQLDRFEKYGQVRGDFNVVENGEKRRLINVFTTSAYSKEAERILRKQQEFNKKITDEFIEDYLTILTGKRKYYHGPGNEKSRTDYGRYTTKKDPEGKYITLDNIFGILIGKCTFYPDEYRASKASYTAQEFNLLNDLNNLTVPTETKKLSEEQKKTIIKYAKTAKTLGASTLLKYIAKLIGASVDQIHGYRIDPNKKPEMHTFETYRKMQSLETISVEELPRKVLDELAHILTLNTEREGIEEAINATLKDTFSQDQVLELVQFRKNNSSLFSKGWHSFSLKLMMELIPELYETSEEQMTILTRLGKQKSKETSKRTKYIDEKELTEEIYNPVVAKSVRQAIKIINEATKKYGIFDNIVIEMARENNEEDAKKEYIKRQKANLDEKNAAMEKAAFQYNGKKELPDNVFHGHKELATKIRLWHQQGEKCLYTGKNIPISDLIQNQYKYEIDHILPLSLSFDDSLSNKVLVLATANQEKGQRTPFQALDSMDDAWSYREFKSYVKDSKLLGNKKKEYLLTEEDISKIEVKQKFIERNLVDTRYSSRVVLNALQDFYKEHQFDTTISVVRGQFTSQLRRKWGLEKSRETYHHHAVDALIIAASSQLRLWKKQNNPLISYTEGQFVDQVTGEIISLSDDEYKELVFKAPYDHFVDTLKSKKFEDSILFSYQVDSKYNRKISDATIYATRKAKLDKENKEYTYTLGKIKDIYALGTKSPSKTGFYKFLDLYNKDKSQFLMFQKDRKTWDEVIEKIIEQYRPFKEYDENGKEVDFNPFEKYRIENGPIRKYSKKGNGPEIKSLKYYDNLLGKFVDITPSESKNPVALLSLNPWRTDVYYNTETSKYEFLGLKYADLCFEKGGAYGISEVKYNKIREKEGIGKESEFKFTLYKNDLILIKDTETNCQQIFRFWSRTGKDNPKSFEKHKIELKPYEKARFEKGEELEVLGKVPPSSNQLQKNMQIENLSIYKVKTDVLGNKHFIKKEGEEPKLKF

SEQ ID NO: 1282 - protein, 1374 aa, Streptococcus pseudoporcinus
MKKRYSYSIGLDIGTNSVGWAVINEDYKVPAKKMTVFGNTDRKTIKKNLLGTVLFDSGETAQARRLKRTNRRRYTRRRYRLCQLQNIFATEMVKVDDTFFQRLSESFFYYQDKAFDKHPIFGNSKEERAYHKTYPTIYHLRKDLADRDQKADLRLIYLALSHIIKFRGHFLIEGKLNSENTDVQKLFIALVTVYNLLFEEEPIAGETCDAKALLTAKTSKSKRLESLISEFPGQKKNGLFGNLLALALGLRPNFKSNFGLSEDAKLQITKDTYEEELDNLLAEIGDHYADLFLAAKNLSDAILLSDILTLSDENTRAPLSASMIKRYEEHQEDLALLKKLVKEQMPEKYWEIFSNAKKNGYAGYIEGKVSQEDFYRYIKPILSRLKGGDEFLAKIDRDDFLRKQRTFDNGSIPHQIHLKELHAILRRQEKYYPFLAEQKEKIEQLLCFRIPYYVGPLAKGGNSSFAWLKRRSDEPITPWNFKDVVDEEASAQAFIEGMTNYDTYLPEEKVLPKHSPLYEMFTVYNELTKVKYIAENMTKPLYLSAEQKEAIIDHLFKQTRKVTVKDLKEKYFSQIEGLENVDVTGVEGAFNASLGTYNDLLKIIKDKAFLDDEANAEILEEIVLILTLFQDEKLIEKRLAKYANLFEKSVLKKLRKRHYRGWGRLSRQLIDGMKDKASGKTILDFLKADDFANRNFIQLINDSSLDFEKLIDDAQKKAIKRESLTEAVANLAGSPAIKKGILQSLKVVDEIVKVMGHNPDNIVIEMSRENQTTAQGLKNARQRLKKIKEVHKKTGSRILEDNSERITNLTLQDNRLYLYLLQDGKDMYTGQDLDINNLSQYDIDHIIPQSFIKDNSIDNLVLTTQKANRGKSDNVPSIEVVRDMKDRVWRRQLANGAISRQKFDHLTKAERGGLADSDKARFLRRQLVETRQITKHVAQLLDSRFNSKSNQNKKLARNVKIITLKSKIVSDFRKDFGLYKLREVNNYHHAHDAYLNAVVGTALLKKYPKLEAEFVYGDYKHFDLVKLISKSDPSLGKATAKVFFYSNIMNFFKEELSLADGTLMKRPVIETNTETGEVVWDKVKDFKTIRKVLSYPQVNIVKKTEIQSGAFSKESVLSKGNSDKLIERKKGWDPKKYGGFDSPNTAYSIFVVAKVAKRKAQKLKTVKEIVGITIMEQAEYEKDNIAFLEKKGYQDIQEKLLIKLPKYSLFELENGRRRLLASANEFQKGNELALSGKYMKFLYLASRYDKLSSKIESEQQKKLFVEQHLHYFDEILDIVVKHATCYIKAENNLKKIISLYKKKEAYSINEQALNMLNLFIFTSLGAPSTFVFFDETIDRKRYTTSSDVLNGILIQQSITGLYETRIDLSRFGGD

SEQ ID NO: 1283 - protein, 1052 aa, Streptococcus pyogenes
LSASMIKRYDEHHQDLTLLKALVRQQLPEKYKEIFFDQSKNGYAGYIDGGASQEEFYKFIKPILEKMDGTEELLAKLNREDLLRKQRTFDNGSIPHQIHLGELHAILRRQEDFYPFLKDNREKIEKILTFRIPYYVGPLARGNSRFAWMTRKSEETITPWNFEEVVDKGASAQSFIERMTNFDKNLPNEKVLPKHSLLYEYFTVYNELTKVKYVTEGMRKPAFLSGEQKKAIVDLLFKTNRKVTVKQLKEDYFKKIECFDSVEISGVEDRFNASLGTYHDLLKIIKDKDFLDNEENEDILEDIVLTLTLFEDREMIEERLKTYAHLFDDKVMKQLKRRRYTGWGRLSRKLINGIRDKQSGKTILDFLKSDGFANRNFMQLIHDDSLTFKEDLQKAQVSGQGDSLHEHIANLAGSPAIKKGILQTVKVVDELVKVMGRHKPENIVIEMARENQTTQKGQKNSRERMKRIEEGIKELGSDILKEYPVENTQLQNEKLYLYYLQNGRDMYVDQELDINRLSDYDVDHIVPQSFLKDDSIDNKVLTRSDKNRGKSDNVPSEEVVKKMKNYWKQLLNAKLITQRKFDNLTKAERGGLSELDKAGFIKRQLVETRQITKHVAQILDSRMNTKYDENDKLIREVRVITLKSKLVSDFRKDFQFYKVREINNYHHAHDAYLNAVVGTALIKKYPKLESEFVYGDYKVYDIRKMIAKSEQEIGKATAKYFFYSNIMNFFKTEITLANGEIRKRPLIETNGETGEIVWDKGRDFATVRKVLSMPQVNIVKKTEVQTGGFSKESILPKRNSDKLIARKKDWDPKKYGGFDSPTVAYSVLVVAKVEKGKSKKLKSVKELVGITIMERSSFEKDPVDFLEAKGYKEVRKDLIIKLPKYSLFELENGRKRMLASAGELQKGNELALPSKYVNFLYLASHYEKLKGSPEDNEQKQLFVEQHKHYLDEIIEQISEFSKRVILADANLDKVLSAYNKHRDKPIREQAENIIHLFTLTNLGAPAAFKCFDTTIGRNRYKSIKEVLDATLIHQSITGLYETRIDLSQLGGD

SEQ ID NO: 1284 - protein, 1368 aa, Streptococcus pyogenes; identical to SEQ ID NO: 37

SEQ ID NO: 1285 - protein, 1367 aa, Streptococcus pyogenes; identical to SEQ ID NO: 241

SEQ ID NO: 1286 - protein, 1368 aa, Streptococcus pyogenes [sequence omitted]

SEQ ID NO: 1287 - protein, 1370 aa, Streptococcus ratti
MKKPYSIGLDIGTNSVGWAVITDDYKVPAKKMKVLGNTDKNYIKKNLLGALLFDSGNTAEDRRLKRTARRRYTRRRNRLLYLQDIFSDEMNKVDESFFHRLEDSFLVSEDKRGDHHPIFGNVVDEVKYHEQFPTIYHLRKYLADTPEKADLRLVYLALAHMIKFRGHFLIDDPKLDVKNTDSQELFSQFLTAYDVTQEDSHLADVKINISDIITEKMNKSRKVEALLFHFPSQKKNSFFGNLVSLVFGLLPNFKTNFNLAEDAKLQLSKDSYDEDLENLLGQIGDEYTDVFVAARKLYDSILLSGILTVNDLSTKAILSASMVRRYEEHNKDLAKLKAFVKANFTHDVFKEVFSDASKNGYAGYIEGKTSQEDFYKYVKNLIGKVDGSADFIEKIDREDFLRKQRTFDNGSIPHQVHLAEMKAILRRQGEYYPFLKEHAEKIQQILTFRIPYYVGPLDRHGHSDFAWASFNSEEKVTPWNFEEIIDKNKSAQAFIERMTNQDLYLPNEKVLPKHSPLYEKYTVYNELTKIKYVTETGTAKFFDANLKQEIFDGLFKKERKVTKRKLLTFLEKNFDEFRIVDIQGLDKETETFNASYGIYQDLLKIIKDKAFMDDSENADILEDIVLTLTLFEDREMIKQRLAKYADLFDKKVIDNLARRRYTGWGRLSAKLLNGIRDKRSRKTIMDYLVDDGRSNRNLMQLITDDNLTFKDEIAKAQYSDNSDDLHQVVQDLAGSPAIKKGILQSVKIVDELVKVMGYEPEQIVVEMARENQTTAKGRRNSQQRYKRLEEAIKNLDRDLNYKILKEHPTDNQALQNDRLFLYYLQNGRDMYTGESLDINRLSDYDIDHIIPQAFIKDNSIDNRVLVSSAKNRGKSDDVPSEDVVNRMRPFWNKLLNCGLISQRKYSNLTKKELTPNDKAGFIKRQLVETRQITKHVARILDEHFNKEFDEDKKRIRKVKVVTLKSNLVSNFRKEFELYKVREINDYHHAHDAYLNAVVAKALLMKYPKLEPEFVYGEYPKYNSYRERKTATQRMFFYSNIMNMFKSKVKLADERIIERPMIEVNDETGEIAWDKTKHIATVKKVLSYPQINIVKKVEEQTGGLTNETIYPRGSFDKLLNRKNTLEASKYGGFGSPTVAYCVLVVADSKNENGKVKKLKLGSELLGITILEKNDFENNSLDFLSRKGYQGVQEKKIIKLPKYSLFEFQDGSRRMLSSVMANDNKRGDLQKANEMILPAYLVKLLYHAKHINSVGEPAHKNYINEHCSEFQDLLNYIRQFADKFVDVDKNLSKIRSLSKSMAEYSVSEICSSFVNLLTLTALGAPADFKFFGTTIPRKRYGSPQSILSATLIHQSITGLYETRIDLSKLGED

SEQ ID NO: 1288 - protein, 1135 aa, Streptococcus salivarius
MSDLVLGLDIGIGSVGVGILNKVTGEIIHKNSRIFPAAQAENNLERRTNRQGRRLTRRKKHRRVRLNHLFEESGLITDFTKVSINLNPYQLRVKGLTAELSNEELFIALKNMVKHRGISYLDDASDDGNSSVGDYAQIVKENSKQLETKTPGQIQLERYQKYGQLRGDFTVEEDGRKHRLINVFPTSAYHAEALRILQTQQEFNPQITDEFINSYLEILTGKRKYYHGPGNEKSRTDYGKYTTKKDAQGQYITLNNIFGILIGKCTFYPEEYRAAKASYTAQEFNLLNDLNNLTVPTETKKLSEEQKYQIITYVKNEKAMGPAKLFKYIAKLLACDIADIKGYRIDKSDKAEIHTFEAYRKMKTLETIDIEQIEREKLDKLAYVLTLNTEREGIQEALDHEFADGTFSQEQVDELVQFRKANSSIFGKGWHSFSVKLMMELIPELYATSEEQMTILTRLGKQKTTSSSNKTKYIDEKQLTEEIYNPVVAKSVRQAIKIVNAAIKKYGDFDNIVIEMARETNEDDEKKAIQKIQKANKAEKDAAMRKAANQYNGKAELPHSVFHGHKQLATKIRLWHQQGERCLYTGKTISIHDLINNPNQFEIDHILPLSITFDDSLANKVLVYATANQEKGQRTPYQALDSMDDAWSFRELKAFVRESKALSNKKKEYLLTEEDISKFDVRKKFIERNLVDTRYASRVVLNALQEHFKAHKIDTKVSVVRGQFTSQLRRHWGIDKTRDTYHHHAVDALIIAASSQLNLWKKQKNTLVSYSEDQLLDIETGELISDDEYKESVFKAPYQHFVDTLKSKEFEDSILFSYQVDSKFNRKISDATIYATRQAKVGKDKKDETYVLGKIKDIYALGTKTPSKTGFYKFLDLYNKDKSQFLVYQKDRKTWDEVIEKIMEQYRPFKESDKNGKEVDFNPFEKYRIENGPIRKYSRKGNGPEIKSLKYYASKLGNHIDITPKDSNNKVVLQSVSPWRADVYFNKTTGSYEILGLKYADLQFEKGTGTYRISEEKYNDIKKKEGVDSDSEFKFTLYKNDLLLIKDTETKEQRLFRFLSRSMPNKKHYVELKPYSKDKFEKNESLIEILGSADKSGRCIKGLAKSNLSIFKVRTDVLGNQHIIKNEGDKPKLDF

SEQ ID NO: 1289 - protein, 1127 aa, Streptococcus salivarius
MSDLVLGLDIGIGSVGVGILNKVTGEIIHKNSRIFPAAQAENNVERRINRQGRRLTRRKKHRRVRLNHLFEESGLITDFTNVSINLNPYQLRVKGLTDELSNEELFIALKNMVKHRGISYLDDASDDGNSSVGDYAQIVKENSKQLETKTPGQIQLERYQKYGQLRGDFTVEEDGKKHRLINVFPTSAYRAEALRILQTQQEFNPQITDEFINSYLQILTGKRKYYHGPGNEKSRTDYGRYTTKKDSEDEYITLDNIFGILIGKCTFYPEEYRAAKASYTAQEFNLLNDLNNLTVPTETKKLSEEQKNQIITNVKNEKAMGPAKLFKYIAKLLSCDVADIKGYRIDKSDKAEIHTFEAYRKMKTLATIDIEQMERENLDKLAYVLTLNTEKEGIQEALEHEFADGTFSQEQIDELVQFRKANSSIFGKGWHSFSVKLMMELIPELYATSEEQMTILTRLGKQKTTSSSNKTKYIDEKQLTEEIYNPVAAKSVRQAIKIVNAAIKEYGDFDNIVIEMARETNEDDEKKAIQKIQKANKDEKDAAMLKAANQYNGKAELPHSVFHGHKQLATKIRLWHQQGERCLYTGKTISIHDLINNSNQFEIDHILPLSITFDDSLANKVLVYATANQEKGQRTPYQALDSMDDAWSFRELKAFVRDSKALSNKKKEYLLTEEDISKFDVRKKFIERNLVDTRYASRVVLNALQEHFRVHKTDTKVSVVRGQFTSQLRRHWGIEKTRDTYHHHAVDALIIAASSQLNLWKKQKNTLVSYSEDQLLDIETGELISDDEYKESVFKAPYQHFVDTLKSKEFEDSILFSYQVDSKFNRKISDATIYATRQAKVGKDKKDETYVLGKIKDIYSQTGYDAFIKIYKKDKSKFLMYRHDPQTFEKVIEPILENYPNKELNEKGKEVPCNPFLKYKEDHGYIRKYSKKGNGPEIKSLKYYDSKLGNHIDITPKNSNNKVVLQSVSPWRADVYFNKTTGKYEILGLKYADLKFEKGTGTYKISEEKYNDIKIKEGVDSDSEFKFTLYKNDLLLIKDTETKEQQLFRFLSRTMPNVKHYVELKPYDKQKFDDNEELIKILGIVAKGGQCKKGVSKPNISIYKIRTDVLGNQHIIKNEGDKPKLDF

SEQ ID NO: 1290 - protein, 1385 aa, Streptococcus salivarius
MTKPYSIGLDIGTNSVGWAVITDDYKVPSKKMKVLGNTSKKYIKKNLLGALLFDSGITAEGRRLKRTARRRYTRRRNRILYLQEIFSTEMATLDDAFFQRLDDSFLVPDDKRDSKYPIFGNLVEEKVYHDEFPTIYHLRKHLADSSKKADLRLVYLALAHMIKYRGHFLIEGDFNSKNNDLQKNFQDFLDTYNAIFESDLSLENSKQLEEIVKDKISKSAKKDRILKLFPGEKNSGIFSEFLKLIVGNQADFRKYFNLDEKTSLQFSKESYDEDLETLLGHIGDDYSDVFLKAKKLYDAILLSGILTVTDNGTEAPLSSAMIMRYKEHEEDLALLKAYIRNISLETYNEVFKDNTKNGYAGYIDGKTSQEDFYVYLKRLLAGLEGADYFLEKIDREDFLRKQRTFDNGSIPYQIYLQEMRAILDKQAKFYPFLAKNKERIEKILTFRIPYYVGPLARGNSDFAWSIRKRNEKITPWNFEDVIDKESSAEAFINRMTSFDLYLPEEKVLPKHSLLYENFTVYNELTKVRFIAEGMRDYQFLDSKQKKDIVRLYFKGKRKVTDKDIIEYLHAIDGYDGIELKGIEKQFNSSLSTYHDLLNIINDKEFLDDSSNETIIEEIIHTLTMFEDREMIKQRLSKFDNIFDKSVLKKLSRRHYTGWGKLSAKLINGIRDEKSGNTILDYLIDDGVSNRNFMQLIHDDALSFKKKIKKAQIIGDKDNIKQVVKSLPGSPAIKKGILQSIKIVDELVKVMGREPESIVVEMARENQYTNQGKSNSQQRLKRLEESLKGLGSKILKENVPTRLSKIDNNALQNDRLYLYYLQNGKDMYTGEELDIDRLSNYDIDHIIPQAFLKDDSIDNKVLVSSASNRGKSDDVPSLEVVKKRKTLWYQLLKSKLISQRKFDNLTKAERGGLSQEEKAGFIQRQLVETRQITKHVARLLDERFNNKKDENNRTLRTVKIITLKSSLVSQFRKDFELYKVREINDFHHAHDAYLNAVVASALLKKYPKLEPEFVYGDYPKYNSFRERKSATEKVYFYSNIMNIFKKSIPLADGTVIDRPLIEVNEETGESVWNKVADLNTVRKVLSYSQVNIVKKVEEQNHGLDRGKPKGLFNANLSSKPKPNSKENLVGAKEYLDPKKYGGYAGISNSFAILVKGTIEKGAKKKITNVLEFQGISILDRIYYRKDKLNFLLEKGYKDIELIIELPKYSLFELSDGSRRMLASILSTNNKRGEIHKGNQIFISQKFVKLLYHAKRISSTFNENHRKYVENHKKEFEELFYYILEFNENYVGAKKNGELLKSAFQSWQNHSIDELCSSFIGPTGSERKGLFELTSRGGAADFEFLGVKIPRYRDYTPSSLLKDATLIHQSVTGLYETRIDLGKLGED

SEQ ID NO: 1291 - protein, 1392 aa, Streptococcus sanguinis
MENKNYSIGLDIGTNSVGWAVITDDYKVPSKKMKVFGNTDKHFIKKNLIGALLFDEGATAEDRRLKRTARRRYTRRKNRLRYLQEIFSEEISKLDSSFFHRLDDSFLVPKDKRGSKYPIFATLEEEKEYHKKFPTIYHLRKHLADSKEKTDLRLIYLALAHMIKYRGHFLYEESFDIKNNDIQKIFNEFISIYDNTFEGSSLSGQNAQVEAIFTDKISKSAKRERVLKLFSDEKSTSLFSEFLKLIVGNQADFKKHFDLEEKAPLQFSKDTYDEDLENLLGQIGDGFTDLFLVAKKLYDAILLSGILTVTDPSTKAPLSASMIERYESHQKDLAALKQFIKNNLPKRYNEVFSDQSKDGYAGYIDGKTTQEAFYKYIKNLLSKFEGADYFLDKIEREDFLRKQRTFDNGSIPHQIHLQEMNAILRRQGEHYPFLKENREKIEKILTFRIPYYVGPLARGNRDFAWLTRNSDQAIRPWNFEEIVDKASSAEEFINKMTNYDLYLPEEKVLPKHSLLYETFAVYNELTKVKFIAEGLRDYQFLDSGQKKQIVNQLFKEKRKVTEKDIIHYLHNVDGYDGIELKGIEKQFNASLSTYHDLLKIIKDKEFMDDPKNEEILENIVHTLTIFEDREMIKQRLAQYDSIFDEKVIKALTRRHYTGWGKLSAKLINGICDKQTGDTILDYLIDDGKINRNFMQLINDDGLSFKEIIQKAQVVGKTDDVKQVVQELPGSPAIKKGILQSIKIVDELVKVMGYAPESIVIEMARENQTTARGKKNSQQRYKRIEDSLKNLAPGLDSNILKENPTDNIQLQNDRLFLYYLQNGKDMYTGKPLDIDQLSSYDIDHIIPQAFIKDDSIDNRVLTSSKDNRGKSDNVPSLEVVQKRKAFWQQLLDSKLISERKFNNLTKAERGGLDERDKVGFIRRQLVETRQITKHVAQILDASFNTEVNEKNQKIRTVKIITLKSNLVSNFRKEFELYKVREINDYHHAHDAYLNAVVAKAILKKYPKLEPEFVYGDYQKYDLKRYISRFKPSKEIEKATEKYFFYSNLLNFFKEEVHYADGIIVKRENIEYSKDTGEIAWNKEKDFATIKKVLSYPQVNIVKKTEIQTHGLDRGKPKGLFNSNPSPKPSEDSKENLVPIKQGLDPRKYGGYAGISNSYAVLVKAIVEKGAKKQQKTILEFQGISILDKINFENNKENYLLKKRYIEILSTITLPKYSLFEFPDGTRRRLASILSTNNKRGEIHKGNELVLPGKYTTLLYHAKNINKKLEPEHLEYVEKHRNDFAKLLECVLNFNDKYVGALKNGERIRQAFTDWETVDIEKLCFSFIGPENSKNAGLFELTSQGSASDFEFLGVKIPRYRDYAPSSLLKATLIHQSITGLYETRIDLSKLGED

SEQ ID NO: 1292 - protein, 1377 aa, Streptococcus sanguinis
MKKPYSIGLDIGTNSVGWAVITDDYKVPSKKMKVLGNTDKHFIKKNLIGALLFDEGTTAEDRRLKRTSRRRYTRRKNRLRYLQEIFSEEISKLDSSFFHRLDDSFLVPEDKRGSKYPIFATLEEEKEYHKKFPTIYHLRKHLADSKEKTDLRLIYLALAHMIKYRGHFLYEESFDIKNNDIQKIFNEFISIYDNTFEGSSLSGQNAQVEAIFTDKISKSTKRERVLKLFSDEKSTGLFSEFLKLIVGNQADFKKHFDLEEKAPLQFSKDTYDEDLENLLGQIGDGFADLFLVAKKLYDAILLSGILTVTDPSTKAPLSASMIERYENHQEDLAALKQFIKNNLSEKYAEVFSDQSKDGYAGFIDGKTTQEAFYKYIKNLLSKLEGADYFLNKIEREDFLRKQRTFDNGSIPHQIHLQEMNAILRRQGEHYLFLKENREKIEKILAFRIPYYVGPLARGNRDFAWLTRNSDQAIRPWNFEEVVDKASSAEDFINKMTNYDLYLPEEKVLPKHSLLYETFAVYNELTKVKFIAEGLRDYQFLDSGQKKQIVNQLFKDKRKVTEKDIIHYLHNVDGYDGIELKGIEKQFNASLSTYHDLLKIIKDKEFMDNPKNGEILENIIHTLTIFEDREMIKQRLAQYDTLFDEKVIKALTRRHYTGWGKLSAKLINGIRDKQTGKTILEYLIDDGDCNRNFMQLINDDGLSFKEIIQKAQVVGKTDDVKQVVQEIPGSPAIKKGILQSIKIVDELVKVMGHNPESIVIEMARENQTTAKGKKNSQQRYKRIEDALKNLAPGLDSNILKENPTDNIQLQNDRLFLYYLQNGKDMYTGKAIDINQLSNYDIDHIIPQAFIKDDSLDNRVLTSSKDNRGKSDNVPSIEVVQKRKAFWQQLLDSKLISERKFNNLTKAKRGGLDERDKVGFIKRQLVETRQITKHVAQLLDTRFNTEVNEENQKIRTVKIITLKSNLVSNFRKEFGLYKVREINDYHHAHDAYLNAVVAKAILKKYPKLEPEFVYGDYQKYDLKRYILKSKASNTIDKATEKYFFYSNLLNFFKEKVRYADGTIKKRENIEYSNDTGEIAWNKEKDFATIKKVLSLPQVNIVKKTEEQTVGQNGGLFDNNIVSKKKVVDASKLIPIKSSLSPEKYGGYARPTIAYSVLVIADIEKGKGKAKKLKRIKEIVGITIQDKKKFESNPVTYLEECGYKNINSNLIIKLPKYSLFEFNDGQRRLLASSIELQKGNELILPYHLTALLYHAQRINKISEPIHKQYVEAHQNEFKELLTTIISLSKKYIQKPNVELLLQQAFDQADKDIYQLSESFISLLKLTSFGAPGAFKFLGVEISQSSVRYKPNSQFLDTTLIHQSITGLYETRIDLSKLGED

SEQ ID NO: 1293 - protein, 1370 aa, Streptococcus sanguinis
MKKPYSIGLDIGTNSVGWAVVTDDYKVPAKKMRVFGDTDRSHIKKNLLGTLLFDDGNTAESRRLKRTARRRYTRRRNRILYLQEIFTESMNEIDESFFHRLDDSFLVPEDKRGSKYPIFATLQEEKEYHKQFPTIYHLRKQLADSKEKSDVRLIYLALAHMIKYRGHFLYEETFDIKNNDIQKIFNEFINIYDNTFEGSSLSGQNAQVEAIFTDKISKSAKRERVLKLFPDEKSTGLFSEFLKLIVGNQADFKKHFDLEEKAPLQFSKDTYDEELENLLGQIGDDFADLFLIAKKLYDAILLSGILTVTDPSTKAPLSASMIERYENHQKDLAALKQFIKNNLPEKYVEVFSDQSKDGYAGYIDGKTTQEAFYKYIKNLLSKFEGADYFLDKIEREDFLRKQRTFDNGSIPHQIHLQEMNAILRRQGEHYPFLKENREKIEKILTFRIPYYVGPLARDNRDFSWLTRNSDEPIRPWNFEEVVDKARSAEDFIHRMTNYDLYLPEEKVLPKHSLLYETFAVYNELTKVKFIAEGLRDYQFLDSGQKKQIVNQLFKEKRKVTEKDIIHYLHNVDGYDGIELKGIEKQFNANLSTYHDLLKITKDKEFMDDPKNEEILENIVHTLTIFEDREMIKQRLAQYDTLFDEKVIKALTRRHYTGWGKLSAKLINGIRDKQSGKTILDYLIDDDKINRNFMQLINDDGLSFKEIIQKAQVVGKTDDVKQVVQELPGSPAIKKGILQSIKIVDELVKVMGYALESIVIEMARENQTTARGKKNSQQRYKRIEDALKNLAPGLDSNILKENPTDNIQLKNDRLFLYYLQNGKDMYTGKPLDINQLSSYDIDHIIPQAFIKDDSIDNRVLTSSKDNRGKSDNVPSLEVVQKRKAFWQQLLDSKLISERKFNNLTKAERGGLDERDKVGFIRRQLVETQQITKNVAQILDARFNTEVKEKNQKIRTVKIITLKSNLVSNFRKEFGLYKVREINNYHHAHDAYLNAVVAKAILKKYPKLEPEFVYGDYQKYDLKKYISRFKPSKEIEKATEKYFFYSNLLNFFKEEVLYADGTIRKRENIEYSKDTGEIAWDKEKDFATIKKVLSYPQVNIVKKREVQTGGFSKESILPKGNSDKLIPRKTKDILWDTTKYGGFDSPVIAYSILLIADIEKGKAKKLKTVKTLVGITIMEKAAFEENPITFLENKGYHNVRKENILCLPKYSLFELENGRRRLLASAKELQKGNEIVLPVCLTTLLYHSKNLHKLDEPEHLEYIQKHRNEFKDLLNLVSEFSQKYILAEANLEKIKDLYADNEQADIEILANSFINLLTFTALGAPAAFKFFGKDVDRKRYTTVSEILNATLIHQSITGLYETRIDLSKLGEE

SEQ ID NO: 1294 - protein, 1421 aa, Streptococcus sanguinis
MTKFNKNYSIGLDIGVSSVGYAVVTEDYRVPAFKFKVLGNTEKEKIKKNLIGSTTFVSAQPAKGTRVFRVNRRRIDRRNHRITYLRDIFQKEIEKVDKNFYRRLDESFRVLGDKSEDLQIKQPFFGDKELETAYHKKYPTIYHLRKHLADADKNSPVADIREVYMAISHILKYRGHFLTLDKINPNNINMQNSWIDFIESCQEVFDLEISDESKNIADIFKSSENRQEKVKKILPYFQQELLKKDKSIFKQLLQLLFGLKTKFKDCFELEEEPDLNFSKENYDENLENFLGSLEEDFSDVFAKLKVLRDTILLSGMLTYTGATHARFSATMVERYEEHRKDLQRFKFFIKQNLSEQDYLDIFGRKTQNGFDVDKETKGYVGYITNKMVLTNPQKQKTIQQNFYDYISGKITGIEGAEYFLNKISDGTFLRKLRTSDNGAIPNQIHAYELEKIIERQGKDYPFLLENKDKLLSILTFKIPYYVGPLAKGSNSRFAWIKRATSSDILDDNDEDTRNGKIRPWNYQKLINMDETRDAFITNLIGNDIILLNEKVLPKRSLIYEEVMLQNELTRVKYKDKYGKAHFFDSELRQNIINGLFKNNSKRVNAKSLIKYLSDNHKDLNAIEIVSGVEKGKSFNSTLKTYNDLKTIFSEELLDSEIYQKELEEIIKVITVFDDKKSIKNYLTKFFGHLEILDEEKINQLSKLRYSGWGRYSAKLLLDIRDEDTGFNLLQFLRNDEENRNLTKLISDNTLSFEPKIKDIQSKSTIEDDIFDEIKKLAGSPAIKRGILNSIKIVDELVQIIGYPPHNIVIEMARENMTTEEGQKKAKTRKTKLESALKNIENSLLENGKVPHSDEQLQSEKLYLYYLQNGKDMYTLDKTGSPAPLYLDQLDQYEVDHIIPYSFLPIDSIDNKVLTHRENNQQKLNNIPDKETVANMKPFWEKLYNAKLISQTKYQRLTTSERTPDGVLTESMKAGFIERQLVETRQIIKHVARILDNRFSDTKIITLKSQLITNFRNTFHIAKIRELNDYHHAHDAYLAVVVGQTLLKVYPKLAPELIYGHHAHFNRHEENKATLRKHLYSNIMRFFNNPDSKVSKDIWDCNRDLPIIKDVIYNSQINFVKRTMIKKGAFYNQNPVGKFNKQLAANNRYPLKTKALCLDTSIYGGYGPMNSALSIIIIAERFNEKKGKIETVKEFHDIFIIDYEKFNNNPFQFLNDTSENGFLKKNNINRVLGFYRIPKYSLMQKIDGTRMLFESKSNLHKATQFKLTKTQNELFFHMKRLLTKSNLMDLKSKSAIKESQNFILKHKEEFDNISNQLSAFSQKMLGNTTSLKNLIKGYNERKIKEIDIRDETIKYFYDNFIKMFSFVKSGAPKDINDFFDNKCTVARMRPKPDKKLLNATLIHQSITGLYETRIDLSKLGED

SEQ ID NO: 1295 - protein, 317 aa, Streptococcus sp.
FEDSILFSYQVDSKFNRKISDATIYATRKAKLDKEKSEETYVLGKIKDIYSQAGYDAFIKIYNKDKSKFLMYHKDPQTFEKVIEEILRTYPSKELNDKNKEIPCNPFEKYRQENGPIRKYSKKSNGPEIKSLKYYDNKLGNHIDITPESSDNQVVLQSLKPWRTDVYFNHQTKKYELMGLKYSDLSFEKGSGKYSISNQKYNSIKRIEGIDEQSEFKFTLYKNDLILIKDSENNEQKLFRFNSRNDTAKHYIELKPYDKAKFDGEQELITILGNVAKGGRCLKGLNKSNISIFKVKTDVLGKKHIIKKEGDEPKLKF

SEQ ID NO: 1296 - protein, 1420 aa, Streptococcus sp.
MAKFNKNYSIGLDIGVSSVGYAVVTEDYRVPAFKFKVLGNTEKEKIKKNLIGSTTFVPAQSAQGTRVFRVNRRRIDRRNHRIAYLRDIFQKEIEKIDKNFYRRLDESFRVLGDKSEDIQIKQPFFGNKELETAYHKKYPTIYHLRKHLADADKNSPVADIREVYMVLSHILKYRGHFLTLGKIDPNNINMQNSWIDFIESCQDAFDLEISDESKTIAAIFKSSENRQEKVKQILSYFQQELLKKDKSIFKQLLQLLFGLKTKFKDCFELEEEPDLNFSKENYDENLENLLGALEEDFSDVFAKLKILRDTILLSSMLTYTGATHARFSATMVERYEEHRKDLQRFKSFVKQNLSEQDYLDIFGRKTPTGFDVDKETKGYVGYISNKMVLTNPQKQKTIQQNFYDYISGKITGIEGAECFLNKISDGTFLRKLRTTDNGAIPNQIHAYELEKIIERQGRDYPFLLENKDKLLSILTFKIPYYVGPLAKGNNSRFAWIKRTTSQDVLDDNDEDTRNGKIRPWNYHKLINMDETRDAFIINLIGNDIILLNEKVLPKRSLIYEEVMLQNELTRVKYKDKYGKIHFFNSELRQEIINNLFKTNSKRVSSAMLLSYLENFTNLQAVEIVSGIEKGKSLNSTLKTYNDLKTIFSEELLDSEIYQKELEEIIKVITVFDDKKSIKNYLTKYFGHLEFLNEEKINQLSKLRYTGWGRYSGKLLLGIRDEDTGFNLMQFLRNDDENRNLTQLISDTTLSFDSAIKAIQSKSTVEDDVFEEIKNLAGSPAIKRGILNSIKIVDELVQIIGYPPQNIIIEMARENMTTEEGQKKAKTRKSKLESALKNIEDSVLESGKVPHSDEQLQSEKLYLYYLQNGKDMYSLDKTGSPTPLYRDQLDQYEVDHIIPYSFLPIDSIDNKVLTHRENNQRKLNNIPDKETVANMKPFWEKLYNAKLISQTKYQRLTTSERTPDGVLTESMKAGFIERQLVETRQIIKHVARILDNRFSDTKIITLKSQLVTNFRNTFHIAKIRELNDYHHAHDAYLAVVVGQTLLKAYPKLAPELIYGHHAHFNRHEENKATLRKHLYSNIMRFFNNPDSKVSKDIWDCNRDLPIVKDVIYNSQINFVKRTMIKKGAFYNQNPVGKLNKQIAANNRYPLKTKVSSLDTSIYGGYGPMNSALSIIIIAERFNEKKGKIETVKEFHDIFIIDYEKFNNNPFQFLNNVSEEGFLKKNDLNRVLAFYRISKYSLMQKIDGTRMLFESKSNLHKVTQFKLTKTQNELFFHMKRLLTKSNLMDLKSESAIKESQNFIQTHQNEFDNIADRLSNYSQKMLGETKSLQTLINGYNERPIKQIDNNEETIRYYYDNFIKMFSFVKSGAPKDIINFFNDKYTVPRMRPKPDRKMLDATLIHQSITGLYETRIDLSKLGED

SEQ ID NO: 1297 - protein, 1371 aa, Streptococcus sp.
MENKNYSIGLDIGTNSVGWSVITDDYKVPSKKMKVLGNTDKHFIKKNLIGALLFDEGTTAEARRLKRTARRRYTRRKNRLRYLQEIFSEEIGKVDSSFFHRLDDSFLIPEDKRGSKYPIFATLAEEKKYHKQFPTIYHLRKQLADSKEKTDLRLIYLALAHMIKYRGHFLYEEAFDIKNNDIQKIFNEFISIYNNTFEGNSLSGQNVQVEAIFTDKISKSAKRERVLKLFPDEKSTGLFSEFLKLIVGNQADFKKHFDLEEKAPLQFSRDTYDEDLENLLGQIGDDFADLFLVAKKLYDAILLSGILTVTNPSTKAPLSASMIERYENHQKDLASLKQFIKNNLPEKYDEVFSDQSEDGYAGYIDGKTTQETFYKYIKNLLSKFEGADYFLDKIEREDFLRKQRTFDNGSIPHQIHLQEMNAILRRQGEHYPFLKENKEKIEKILTFRIPYYVGPLARGNRDFAWLTRNSDQAIRPWNFEEIVDKASSAEDFINKMTNYDLYLPEEKVLPKHSLLYETFAVYNELTKVKFIAEGLRDYQFLDSGQKKQIVTQLFKEKRKVTEKDIIQFLHNVDGYDGIELKGIEKQFNASLSTYHDLLKIIKDKAFMDDAKNEAILENIVHTLTIFEDREMIKQRLAQYDSLFDEKVIKALTRRHYTGWGKLSAKLINGISDKQTGNTILDYLIDDGEINRNFMQLINDDGLSFKEIIQKAQVVGKTNDVKQVVQELPGSPAIKKGILQSIKIVDELVKVMGHAPESIVIEMARENQTTARGKKNSQQRYKRIEDSLKILASGLNSKILKEHPTDNIQLQNDRLFLYYLQNGKDMYTGEALDINQLSSCDIDHIIPQAFIKDDSLDNRVLTSSKDNRGKSDNVPSLEVVDKMKVFWQQLLDSKLISYRKFNNLTKAERGGLNELDKVGFIKRQLVETRQITKHVAQILDARFNKEVTEKDKKNRTVKIITLKSNLVSNFRKEFELYKVREINDYHHAHDAYLNAVVAKAILKKYPKLEPEFVYGDYQKYDLKRYISRSKDPKEIEKATEKYFFYSNLLNFFKEEVHYADGTIVKRENIEYSKDTGEIAWNKEKDFATIKKVLSLPQVNIVKKREVQTGGFSKESILPKGNSDKLIPRKTKDILWDTTKYGGFDSPVIAYSILLIADIEKGKAKKLKTVKTLVGITIMEKDAFEKNPIAFLENKGYHNVCKENILCLPKYSLFELENGRRRLLASAKELQKCNEIVLPVYLTTLLYHSKNVHKLDEPGHLEYIQKHRNEFKDLLNLVSEFSQKYVLADANLEKIKNLYADNEQADIEILANSFINLLTFTALGAPAAFKFFGKDVDRKRYTTVSEILNATLIHQSITGLYETRIDLSKLGED

SEQ ID NO: 1298 - protein, 93 aa, Streptococcus sp.
MILIKDSENNEQKLFRFNSRNDTAKHYVELKPYDKARFDGQQELITILGNVAKGGQCLKGLNKSNISIFKVKTDVLGKKHIIKKEGDEPKLKF

SEQ ID NO: 1299 - protein, 1121 aa, Streptococcus sp.
MNGLVLGLDIGIASVGVGILEKNSGKIIHANSRLFPAATADNNVERRKNRQARRLHRRKKHRGVRFQDLFEDYGLLTDFSKVSINLNPYRLRVDGLNQQLTNEELFIALKNIVKRRGISYLDDASEDGGTVSSDYGKAVEENRKLLAEQTPGQIQLERFEKYGQVRGDFTVVENGEKRRLINVFSTSAYRKEAERILRKQQEFNSKITDEFIEDCLKILTGKRKYYHGPGNEKSRTDYGRFRTDGTTLDNIFGILIGKCTFYPDEYRASKASYTAQEFNLLNDLNNLTVPTETKKLSEEQKKVIVEYAKEAKTLGASTLLKYIAKMIDASVDQIRGYRVDVNNKPEIHTFEAYRKMQSLETISVGELSRNVLDELAHILTLNTEREGIEEAINTKLKDSFSQDQVLELVQFRKNNSSLFSKGWHNFSLKLMMELIPELYETSEEQMTILTRLGKQKSKEISKRTKYIDEKELTEEIYNPVVAKSVRQAIKIINEATKKHGIFDNIVIEMARENNEEDAKKDYIKRQKANQDEKNAAMEKAAFQYNGKKELPDSIFHGQKELATKIRLWHQQGEKCLYTGKNIPISDLIHNQYKYEIDHILPLSLSFDDSLSNKVLVLATANQEKGQRTPFQALDSMDDAWSYREFKSYVKESKLLGNKKKEYLLTEEDISKIEVKQKFIERNLIDTRYSSRVVLNALQDFYKAHKFDTTISVVRGQFTSQLRRKWGLEKSRETYHHHAVDALIIAASSQLRLWKKQNNPLIAYKEGQFVDSETGEIISLSDDEYKELVFKAPYDHFVDTLSSKTFEDSILFSYQVDSKFNRKISDATIYATRKAKLDKEKSEETYVLGKIKDIYSQAGYDAFIKIYNKDKSKFLMYHKDPQTFEKVIEEILRTYPSKELNDKNKEIPCNPFEKYRQENGPIRKYSKKSNGPEIKSLKYYDNKLGNHIDITPESSDNQVVLQSLKPWRTDVYFNHQTKKYELMGLKYSDLSFEKGSGKYSISNQKYNSIKRIEGIDEQSEFKFTLYKNDLILIKDSENNEQKLFRFNSRNDTAKHYIELKPYDKAKFDGEQELITILGNVAKGGRCLKGLNKSNISIFKVKTDVLGKKHIIKKEGDEPKLKF

SEQ ID NO: 1300 - protein, 1026 aa, Streptococcus sp.
MNGLVLGLDIGIASVGVGILEKNSGKIIHANSRLFPAATADNNVERRKNRQARRLNRRKKHRGVRFQDLFEDYGLLTDFSKVSINLNPYRLRVDGLNQQLTNEELFIALKNIVKRRGISYLDDASEDGGAVSSDYGKAVEENRKLLAEQTPGQIQLERFEKYGQVRGDFTVVENGEKRRLINVFSTSAYRKEAEKILRKQQEFNNQITDEFIEDYLKILTGKRKYYHGPGNEKSRTDYGRFRTDGTTLDNIFGVLIGKCTFYPNEYRASKSSYTAQEFNLLNDLNNLTVPTETKKLSEEQKKVIVEYAKEAKTLGASTLLKYIVKMIDASVDQISGYRVDVNNKPEMHTFEVYRKMQSLETISVGELSRNVLDELAHILTLNTEREGIEEAINSKLMGVFSQDQVLELVQFRKNNSSLFSKGWHNFSLKLMMELIPELYETSEEQMTILTRLGKQKSKETSKRTKYIDEKELTEEIYNPVVAKSVRQAIKIINEATKKHGIFDNIVIEMARENNEEDAKKDYIKRQKANQDEKNAAMEKAAFQYNGKKELPGNIFNGHKELATKIRLWHQQGEKCLYTGKTIPISDLIHNQYKYEIDHILPLSLSFDDSLSNKVLVHATANQEKGQRTPFQALDSMDDAWSYREFKSYVKDLKSLSNKKKDYLLTEEDISKIEVKQKFIERNLVDTRYSSRVVLNALQDFYKSHQFDTTISVVRGQFTSQLRRKWGLEKSRETYHHHAVDALIIAASSQLRLWKKQNNPLITYKEGQFIDSQTGEIISLTDDEYKELVFKAPYDHFVDTLHSKTFEDGILFSYQVDSKYNRKISDATIYATRKAKLDKDKSEETYVLGKIKDIYSQAGYDAFIKIYNKDKRKFLMYHKDPQTFEKVIEEILRTYPSKERNDKNKEVPCNPFEKYRQENGPIRKYSKKGNGPEIKCLKYYDNKLGNYIDISPDGSDNQVVLQSLKPWRTDVYFNHQTKKYELMGLKYSDLSFEKGSGKYSISNEKYNSIKRIEGVNEQSEFKFTLYK

SEQ ID NO: 1301 - protein, 1377 aa, Streptococcus sp.
MNNKPYSIGLDIGTNSVGWSVITDDYKVPSKKMKVLGNTDKRFIKKNLIGALLFDEGTTAEARRLKRTARRRYTRRKNRLRYLQEIFAEEMSKVDSSFFHRLDDSFLIPEDKRGSKYPIFATLVEEKEYHKQFPTIYHLRKQLADSKEKADLRLIYLVLAHMIKYRGHFLYEEAFDIKNNDIQKIFNEFISIYDNTFEGSSLSGQNAQVETIFTDKISKSAKRERVLKLFPDEKSTGLFSEFLKLIVGNQADFKKHFDLEEKAPLQFSKDTYDEDLENLLEQIGDDFADLFVAAKKLYDAILLSGILTVTDPSTKAPLSASMIERYENHQKDLAVLKQFIKTNLPEKYVEVFSDQSKDGYAGYIDGKTTQEAFYKYIKNLLSKFDGADYFLDKIEREVFLRKQRTFDNGSIPHQIHLQEMNTILRRQGEHYPFLKENKEKIEKILTFRIPYHVGPLARGNRDFAWLTRNSDQAIRPWNFEEIVDKASSAEDFINKMTNYDLYLPEEKVLPKHSLLYETFAVYNELTKVKFIAEGMRDYQFLDSGQKKKIINQLFKKKRKVTEDDIIDCLQKIDNYDGIELKGIEKQFNASLSTYHDILKIIRDKEFMDDPKNGDILENVIHTLTIFEDREMIKQRLAQYNSIFDEKVIKALSRKHYTGWGKLSAKLIDGIRDKQTGKTILDYLMDDGKSNRNFMQLIKDDELSFTEIIQKAQVVGDTDNLRQVVQNLPGSPAIKKGILQSIKIVDELVKVMGHAPESIVIEMARENQTTARGKKNSQQRYKRIEDSLKNLASGLDSNILKENPTDNIQLQNDRLFLYYLQNGKDMYTGEALNINQLSSYDIDHIIPQAFIKDDSLDNRVLTSSKDNRGKSDNVPSLEVVEKMKAFWQQLLDSKLISERKYNNLTKAERERGGLNELDKVGFIKRQLVETRQITKHVAQILDARFNKEVTEKNKKNRNVKIITLKSNMVSNFRKEFGLYKVREINDYHHAHDAYLNAVVAKAILKKYPKLEPEFVYGDYQKYDLKRYISRSKDPKEVEKATEKYFFYSNLLNFFKEEVHYADGTIVKRENIEYSKDTGEIAWNKEKDFATIKKVLSLPQVNIVKKTEEQTVGQNGGLFDNNIVSKKKVVDASKLIPIKSGLSPEKYGGYARPTIAYSVLVTYKQNNKIKNTMVGIPVLTKLEFERDPNLYLRNLGINNVSHVIKLVKYTVLEFKHKYGTYRRFIVSNQELKRANQIFVTTKQMKLISQYTTLDKNEHDSLLKNNQQLIQSIWNQFLEFMLATDLVNKKQYDELILTNNQTIEECRNIMNRVITTLSFTNINAGQKKIIFDDTLSLPIKRWQFTDSDKMVKKIIESTLIHQSITGLYETRIDLSKLGED

SEQ ID NO: 1302 - protein, 1371 aa, Streptococcus sp.
MNNNNYSIGLDIGTNSVGWAVITDDYKVPSKKMRVLGNTDKRFIKKNLIGALLFDEGTTAEDRRLKRTARRRYTRRKNRLRYLQEIFAEEMSKVDSSFFHRLDDSFLVPEDKSGSKYPIFATLAEEKEYHKKFPTIYHLRKHLADSKEKADLRLIYLALAHITKYRGHFLYEEAFDIKNNDIQKIFNEFINIYDNTFEGSSLSGQNAQVEAIFTGKISKSVKREHVLKLFPDEKSTGLFSEFLKLIVGNQADFKKHFDLEEKASLQFSKDTYDEDLENLLGQIGDDFADLFLVAKKLYDAILLSGILTVTDPSTKAPLSASMIERYENHQEDLAALKQFIKNNLPEKYAEVFSDQSKDGYAGYIDGKTTQEAFYKYIKNLLSKFEGADYFLDKIEREDFLRKQRTFDNGSIPHQIHLQEMNAILRRQGEHYPLLKENKEKIEKILTFRIPYYVGPLARGNRDFAWLTRNSDQAIRPWNFEEIVDKASSAESFINKMTNYDLYLPEEKVLPKHSLLYETFAVYNELTKVKFIAEGLRDYQFFDSGQKKQIVNQLFKEKRKVTEKDIIHYLHNVDGYDGIELKGIEKQFNASLSTYHDLLKIIKDKEFMDNHKNQEILENIVHTLTIFEDREMIKQRLAQYDSIFDEKVIKALTRRHYTGWGKLSAKLINGICDKKTGKTILDYLIDDGYNNRNFMQLINDDGLSFKEIIQKAQVVGKTDDLTQVVRELSGSPAIKKGILQSIKIVDELVKIMGYAPESIVIEMARENQTTAKGKKNSQQRYKRIEDALKNLAPGLDSTISKENPTDNIQLQNDRLFLYYLQNGKDMYTGEALDINQLSSYDIDHIIPQAFIKDDSLDNRVLTSSKDNRGKSDNVPSLEVVKKRKAFWQQLLDSKLISERKFNNLTKAERGGLDERDKVGFIKRQLVETRQITKHVARILDARFNTEVSEKNQKIRSVKIITLKSNLVSNFRKEFKLYKVREINDYHHAHDAYLNAVVAKAILKKYPKLEPEFVYGDYQKYDLKRYISKSKDPKEVEKATEKYFFYSNLLNFFKEEVHYADGTIVKRENIEYSKDTGEIAWNKEKDFVTIKKVLSYPQVNIVKKREVQTGGFSKESILPKGNSDKLIPRKTKDILWDTTKYGGFDSPVIAYSILLIADIEKGKAKKLKTVKTLVGITIMEKAAFEKNPITFLENKGYHNVRKENILCLPKYSLFELENGRRRLLASAKELQKGNEIVLPVYLTTLLYHSKNVHKLDEPEHLEYIQKHRYEFKDLLNLVSEFSQKYVLAEANLEKIKSLYVDNEQADIEILANSFINLLTFTALGAPAAFKFFGKDVDRKRYTTVSEILNATLIHQSITGLYETRIDLSKLGED

SEQ ID NO: 1303 - protein, 1139 aa, Streptococcus sp.
MSDLVLGLDIGIGSVGVGILNKVTGEIIHKNSRIFPAAQAENNLERRTNRQGRRLTRRKKHRRVRLNHLFEESGLITDFTKVSINLNPYQLRVKGLTAELSNEELFIALKNMVKHRGISYLDDASDDGNSSVGDYAQIVKENSKQLETKTPGQIQLERYQKYGQLRGDFTVEEDGRKHRLINVFPTSAYHAEALRILQTQQEFNPQITDEFINSYLEILTGKRKYYHGPGNEKSRTDYGKYTTKKDAQGQYITLNNIFGILIGKCTFYPEEYRAAKASYTAQEFNLLNDLNNLTVPTETKKLSEEQKYQIITYVKNEKAMGPAKLFKYIAKLLSCDVADIKGYRIDKSDKAEIHTFEAYRKMKTLETLDVKKMAREELDKLAYVLTLNTEREGIQEALDHEFADGTFSQEQVDELVQFRKANSSIFGKGWHSFSVKLMMELIPELYATSEEQMTILTRLGKQKTTSSSNKTKYIDEKQLTEEIYNPVVAKSVRQAIKIVNAAIKKYGDFDNIVIEMARETNEDDEKKAIQKIQKANKAEKDAAMRKAANQYNGKAELPHSVFHGHKQLATKIRLWHQQGERCLYTGKTISIHDLINNPNQFEIDHILPLSITFDDSLANKVLVYATANQEKGQRTPYQALDSMDDAWSFRELKAFVRESKALSNKKKEYLLTEEDISKFDVRKKFIERNLVDTRYASRVVLNALQEHFRTHKIDTKVSVVRGQFTSQLRRHWGIEKTRDTYHHHAVDALIIAASSQLNLWKKQKNTLVSYSEDQLLDIETGELISDDEYKESVFKAPYQHFVDTLKSKEFEDSILFSYQVDSKFNRKISDATIYATRKAKLDKEKKEYTYTLGKIKDIYALGTKTPSKTGFYKFLDLYKKDKSQFLMYQKDRRTWDEVIEKILEQYRPFKEKDKNGKEVDFNPFEKYRIENGPIRKYSRKGNGPEIKSLKYYDNLLGRFVDITPSESKNPVALLSLNPWRTDVYYNTETRKYEFLGLKYADLCFEKGGSYGISKVKYNKIREKEGIGKNSEFKFTLYKNDLILIKDTETNRQQIFRFWSRTGKDNPKSFEKHKLELKPYEKTRFEKGEELKVLGKVPPSSNRLQKNMQIENLSIYKVRTDVLGNQHIIKNEGDKPKLDF

SEQ ID NO: 1304 - protein, 1375 aa, Streptococcus sp.
MSNKSYSIGLDIGTNSVGWAVITDDYKVPSKKMKVLGNTDKHFIKKNLIGALLFDEGTTAEDRRLKRTARRRYTRRKNRLRYLQEIFSQEISKVDSSFFHRLDDFFLVPEDKRGSKYPIFATLVEEKEYHKKFPTIYHLRKHLADSKEKTDLRLIYLALAHMIKYRGHFLYEESFDIKNNDIQKIFSEFISIYDNTFEGKSLSGQNAQVEAIFTDKISKSTKRERVLKLFPDEKSTGLFSEFLKLIVGNQADFKKHFDLEEKAPLQFSKDTYDEDLENLLGQIGDDFADLFLVAKKLYDAILLSGILTVKDLSTKAPLSASMIERYENHQKDLAALKQFIQNNLQEKYDEVFSDQSKDGYAGYIDGKTTQEAFYKYIKNLLSKFEGADYFLDKIEREDFLKKQRTFDNGSIPHQIHLQEMNAIIRRQGEHYPFLQENKEKIEKILTFRIPYYVGPLARGNGDFAWLTRNSDQAIRPWNFEEIVDQASSAEDFINKMTNYDLYLPEEKVLPKHSLLYETFAVYNELTKVKFIAEGLTRYQFLDKKQKKDIFDTFFKAENKRKVTEKDIIHYLHNVDGYDGIELKGIEKQFNASLSTYHDLLKIIKDKAFMDDSKNEEILENIIHTLTIFEDREMIKQRLAQYDSLFDEKVIKALTRRHYTGWGKLSAKLINGIRDKKSGKTILDYLIDDGEINRNFMQLIHDDGLSFKEIIQKAQVFGKTNDVKQVVQELPGSPAIKKGILQSIKIVDELVKVMGHAPESIVIEMARENQTTARGKKNSQQRYKRIEDSLKNLASGLDSNILKENPTDNIQLQNDRLFLYYLQNGRDMYTGKPLEINQLSNYDIDHIIPQAFIKDDSLDNRVLTSSKDNRGKSDNVPSLEVVEKMKAFWQQLLDSKLISERKFNNLTKAERERGGLNELDKVGFIKRQLVETRQITKHVAQFLDARFNKEVTEKDKKNRNVKIITLKSNLVSNFRKEFGLYKVREINDYHHAHDAYLNAVLAKAILKKYPKLEPEFVYGDYQKYDLQRYISKSREPKEVEKATQKYFFYSNLLNFFKEEVHYADGTIVKRENIEYSKDTGEIAWNKEKDFATVKKVLSLPQVNIVKKTEVQTGGFSKESILPKGNSDKLIPRKTKEILWDTTKYGGFDSPVIAYSILLIADIEKGKAKKLKTVKTLVGITIMEKATFEKNPITFLENKGYHNVRKENILCLPKYSLFELESGRRRMLASAKELQKGNEIVLPVYLTTLLYHSKNVHKLDEPEHLEYIQKHRYEFKDLLNLVSEFSQKYVLADANLEKIKNLYADNEQADIEILANSFINLLTFTALGAPAAFKFLGKDVDRKRYTTVSEILNATLIHQSITGLYETRIDLSKLGED

SEQ ID NO: 1305 - protein, 206 aa, Streptococcus sp.
RTPFQALDSMDDAWSYREFKSYVKESKLLGNKKKEYLLTEEDISKIEVKQKFIERNLIDTRYSSRVVLNALQDFYKAHKFDTTISVVRGQFTSQLRRKWGLEKSRETYHHHAVDALIIAASSQLRLWKKQNNPLIAYKEGQFVDSETGEIISLSDDEYKELVFKAPYDHFVDTLSSKTFEDSILFSYQVDSKFNRKISDATIYATR

SEQ ID NO: 1306 - protein, 1122 aa, Streptococcus suis
MSNGKILGLDIGIASVGVGVIDAQTGEIIHASSRIFPSANAANNAERRTFRGSRRLIRRKKHRIKRLDDLFNDFHINLDGEMSTDNPYVLRVKGLSQKLTVEELYISIKNIMKRRGISYLDDAESDNEAGRSDYAKAIERNRQLLTSKTPGEIQLERLEKYGQLRGNFTIIDEEGQSQQIINVFSTSDYVKEVEKILDCQKMYHKFISDEFCDKLIELLREKRKYYVGPGNEKSRTDYGIYRTDGTTLENLFGILIGKCTFYPDQYRSSRASYTAQEFNFLNDLNNLTVPTETKKLSQEQKEFLVNYAKETSVLGAGKILQQIAKLADCKVEDIRGYRLDNKDKPELHTFETYRAMKGLVPLVDIGVLSREQLDILADILTLNTDFEGIREALKKQLPNVFDEKQVKGLASFRKSKSQLFAKGWHNLSQKIMLEVIPELYATSDEQMTILTRLGKFEKSSVAEYPSSINVDEITDEIYNPVVAKSIRQTIKIINASIKKWDEFDQIVIEMPRDRNEDEEKKRIADGQKANAKEKADSILRAAELYCAGKVLPDYVYNGHNQLATKIRLWYQQGERCIYTGQPISIHDLIHNQNQYEIDHILPLSLTFDDSLSNKVLVLATANQEKAQRTPYNYLKSATSAWSYREFKDYVTKRKGIGKKKCEYLTFEEDINGFEVRSKFIQRNLVDTRYASKVILNALQDYFKISGIQTKVSVVRGQFTSQLRHKWGIEKTRETYHHHAVDALIIAASSQLRLWKKQESPLVVDYQEGRQVDLETGEILELTDEQYKELVYQPPYQGFVNTISSSAFDNEILFSYQVDSKVNRKISDATIYATRNAQLGKDKTEGIYVLGKIKDIYTQAGYEAFLKRYTKDKTSFLMYHKDLDTWEKVIEIILRDYREYDEKGKEIGNPFERYRRENGYVKKYSRKGNGTAIKSLKYYDNKLGNHIDITPENSRNAVVLQSLKPWRTDVYFNKETGKYEFLGIKYSDLSFEKGTGEYGISQEKYDSIKIAEGVAKKSIFKFTLYKQDLLFIKDIENNFGKLLRFTSKNDTSKHYVELKPYDKNKFGTEEPLLPVLGNVAKSGQCIKGLNKSNISIYKVRTDILGYRHFIKQEGEHPQLKFKK

SEQ ID NO: 1307 - protein, 1381 aa, Streptococcus suis
MVKKKYAIGIDIGTNSVGWSIVTDDYKVPSKKMKVFGNTEKRYIKKNLLGTLLFDEGNTAENRRLKRTARRRYTRRRNRILYLQEIFAEEINKIDDSFFQRLDDSFLIVEDKQGSKHPIFGTLQEEKEYHKQFPTIYHLRKQLADSSQKADIRLIYLALAHIIKYRGHFLFEGDLKSENKDVQHLFNDFVEMFDKTVEGSYLSENLPNVADVLVEKVSKSRRLENILHYFPNEKKNGLFGNFLALALGLQPNFKTNFELAEDAKIQFSKETYEEDLEELLGKIGDDYADLFIATKSLYDGILLAGILSTTDSTTKAPLSSSMVNRYEEHQKDLALLKNFIHQNLSDSYKEVFNDKLKDGYAGYIEGKTTQENFYRFIKKAIEKIEGSNYFIDKIDREDFLRKQRTFDNGSIPHQIHLQEMHAIIRRQAEFYPFLVENQDKIEKILTFRIPYYVGPLARGKSEFAWLNRKSDEKIRPWNFDEMVDKETSAENFITRMTNYDRYLPDQKVLPKHSLLYEKFAVYNELTKVKFIAEGMRDYQFLDSGQKKDIVKTLFKTKRKVTAKDIKAYLENSNGYAGVELKGLEEQFNASLPTYHDLLKILRDKAFIDAEENQEILEDIVLTLTLFEDREMIRKRLEKYKDILTEEQRKKLERRHYTGWGRLSAKLINGILDKVTRKTILGYLIDDGTSNRNFMQLINDDTLSFVDEIRLAQGSGEAEDYRAEVQNLAGSPAIKKGILQSLKIVDELIEVMGYEPEHIVVEMARENQFTNQGRRNSQQRINRLENALKDFGSKILEEQKPYGVSKVNNIHLQSDRLFLYYLQNGKDMYTDEELDIDHLSEYDIDHIIPQAFIKDDSLDNKVLTKSAKNRGKSDDVPSMEIVHNRKNFWRQLLKSKLISQRKFDNLTKAERGGLTNEDKARFIQRQLVETRQITKHVARMLDTRFNTKLDEAGNRIRDPKVNIITLKSNLVSQFRKDYQLYKIREINNYHHAHDAYINAVVATALLKKYPQLAPEFVYGEYPTYNSYNSRKSATEKVLFYSNIMNFFKRIVVHSKTGEVRIRPVIEVNKETGEIVWDKKSDFRTVRKVLSYPQVNVVKKTEVQNHGLDRGKPKGFYNANLSPRPKEGSVENLVPAKQSFDTKRYGGYAGISNSYAVLVNGIIEKGKKKSKAEVTEFQGISILARKDFDKNPKQYLLNLGYKDIKSIIKLPKYSLFELENGSRRMLASILSTNNKRGEIHKGNEMYLPDKFVTLLYHAMRVNRTLEPGHKKYVETHRHVFDELLIYILEYNEKIVGAKANGKRIVEAYSARKDTDNLEELCNSFINLLNLTALGSAVDFEFLGTKIPRYRDYTPSSLLKATLIHQSVTGLYETRIDLSKLGGD

SEQ ID NO: 1308 - protein, 39 aa, Streptococcus thermophilus
GRCIKGLGKSNISIYKVRTDVLGNQHIIKNEGDKPKLDF

SEQ ID NO: 1309 - protein, 302 aa, Streptococcus thermophilus
MIRRKKHRIVRLNRLFEESGLITDFTKISINLNPYQLRVKGLTDELSNEELFIALKNMVKHRGISYLDDASDDGNSSVGDYAQIVKENSKQLETKTPGQIQLERYQTYGQLRGDFTVEKDGKKHRLINVFPTSAYRSEALRILQTQQEFNPQITDEFINRYLEILTGKRKYYHGPGNEKSRTDYGRYRTSGETLDNIFGILIGKCTFYPDEFRAAKASYTAQEFNLLNDLNNLTVPTETKKLSKEQKNQIINYVKNEKAMGPAKLFKYIAKLLSCDVADIKGYRIDKSGKAERFILSKPIEK

SEQ ID NO: 1310 - protein, 1121 aa, Streptococcus thermophilus
MSDLVLGLDIGIGSVGVGILNKVTGEIIHKNSRIFPAAQAENNLVRRTNRQGRRLTRRKKHRIVRLNRLFEESGLITDFTKISINLNPYQLRVKGLTDELSNEELFIALKNMVKHRGISYLDDASDDGNSSVGDYAQIVKENSKQLETKTPGQIQLERYQTYGQLRGDFTVEKDGKKHRLINVFPTSAYRSEALRILQTQQEFNPQITDEFINRYLEILTGKRKYYHGPGNEKSRTDYGRYRTSGETLDNIFGILIGKCTFYPDEFRAAKASYTAQEFNLLNDLNNLTVPTETKKLSKEQKNQIINYVKNEKAMGPAKLFKYIAKLLSCDVADIKGYRIDKSGKAEIHTFEAYRKMKTLETLDIEQMDRETLDKLAYVLTLNTEREGIQEALEHEFADGSFSQKQVDELVQFRKANSSIFGKGWHNFSVKLMMELIPELYETSEEQMTILTRLGKQKTTSSSNKTKYIDEKLLTEEIYNPVVAKSVRQAIKIVNAAIKEYGDFDNIVIEMARETNEDDEKKAIQKIQKANKDEKDAAMLKAANQYNGKAELPHSVFHGHKQLATKIRLWHQQGERCLYTGKTISIHDLINNSNQFEVDHILPLSITFDDSLANKVLVYATANQEKGQRTPYQALDSMDDAWSFRELKAFVRESKTLSNKKKEYLLTEEDISKFDVRKKFIERNLVDTRYASRVVLNALQEHFRAHKIDTKVSVVRGQFTSQLRRHWGIEKTRDTYHHHAVDALIIAASSQLNLWKKQKNTLVSYSEDQLLDIETGELISDDEYKESVFKAPYQHFVDTLKSKEFEDSILFSYQVDSKFNRKISDATIYATRQAKVGKDKADETYVLGKIKDIYTQDGYDAFMKIYKKDKSKFLMYRHDPQTFEKVIEPILENYPNKQMNEKGKEVPCNPFLKYKEEHGYIRKYSKKGNGPEIKSLKYYDSKLGNHIDITPKDSNNKVVLQSVSPWRADIYFNNTTGKYEILGLKYADLQFEKGTGTYKISQEKYNDIKKKEGVDSDSEFKFTLYKNDLLLVKETETKEQQLFRFLSRTMPKQKHYVELKPYDKQKFEGGEALIKVLGNVANGGQCIKGLGKSNISIYKVRTDVLGNQHIIKNEGDKPKLDF

SEQ ID NO: 1311 - protein, 1121 aa, Streptococcus thermophilus
MSDLVLGLDIGIGSVGVGILNKVTGEIIHKNSRIFPAAQAENNLVRRTNRQGRRLTRRKKHRIVRLNRLFEESGLITDFTKISINLNPYQLRVKGLTDELSNEELFIALKNMVKHRGISYLDDASDDGNSSVGDYAQIVKENSKQLETKTPGQIQLERYQTYGQLRGDFTVEKDGKKHRLINVFPTSAYRSEALRILQTQQEFNPQITDEFINRYLEILTGKRKYYHGPGNEKSRTDYGRYRTSGETLDNIFGILIGKCTFYPDEFRAAKASYTAQEFNLLNDLNNLTVPTETKKLSKEQKNQIINYVKNEKAMGPAKLFKYIAKLLSCDVADIKEYRIDKSGKAEIHTFEAYRKMKTLETLDIEQMDRETLDKLAYVLTLNTEREGIQEALEHEFADGSFSQKQVDELVQFRKANSSIFGKGWHNFSVKLMMELIPELYETSEEQMTILTRLGKQKTTSSSNKTKYIDEKLLTEEIYNPVVAKSVRQAIKIVNAAIKEYGDFDNIVIEMARETNEDDEKKAIQKIQKANKDEKDAAMLKAANQYNGKAELPHSVFHGHKQLATKIRLWHQQGERCLYTGKTISIHDLINNSNQFEVDHILPLSITFDDSLANKVLVYATANQEKGQRTPYQALDSMDDAWSFRELKAFVRESKTLSNKKKEYLLTEEDISKFDVRKKFIERNLVDTRYASRVVLNALQEHFRAHKIDTKVSVVRGQFTSQLRRHWGIEKTRDTYHHHAVDALIIAASIQLNLWKKQKNTLVSYSEDQLLDIETGELISDDEYKESVFKAPYQHFVDTLKSKEFEDSILFSYQVDSKFNRKISDATIYATRQAKVGKDKADETYVLGKIKDIYTQDGYDAFMKIYKKDKSKFLMYRHDPQTFEKVIEPILENYPNKQINEKGKEVPVNPFLKYKEEHGYIRKYSKKGNGPEIKSLKYYDSKLGNHIDITPKDSNNKVVLQSVSPWRADVYFNKTTGKYEILGLKYADLQFEKGTGTYKISQEKYNDIKKKEGVDSDSEFKFTLYKNDLLLVKDTETKEQQLFRFLSRTMPKQKHYVELKPYDKQKFEGGEALIKVLGNVANSGQCKKGLGKSNISIYKVRTDVLGNQHIIKNEGDKPKLDF

SEQ ID NO: 1312 - protein, 1121 aa, Streptococcus thermophilus
MSDLVLGLDIGIGSVGVGILNKVTGEIIHKNSRIFPAAQAENNLVRRTNRQGRRLTRRKKHRRVRLNRLFEESGLITDFTKISINLNPYQLRVKGLTDELSNEELFIALKNMVKHRGISYLDDASDDGNSSVGDYAQIVKENSKQLETKTPGQIQLERYQTYGQLRGDFTVEKDGKKHRLINVFPTSAYRSEALRILQTQQEFNPQITDEFVNRYLEILTGKRKYYHGPGNEKSRTDYGRYRTNGETLDNIFGILIGKCTFYPEEFRAAKASYTAQEFNLLNDLNNLTVPTETKKLSKEQKNQIINYVKNEKAMGPAKLFKYIAKLLSCDVADIKGYRIDKSGKAEIHTFEAYRKMKTLETLDIEQMDRETLDKLAYVLTLNTEREGIQEALEHEFADGSFSQKQVDELVQFRKANSSIFGKGWHNFSVKLMMELIPELYETSEEQMTILKRLGKQKTTSSSNKTKYIDEKLLTEEIYNPVVAKSIRQAIKIVNAAIKEYGDFDNIVIEMARETNEDDEKKAIQKIQKANKDEKDAAMLKAANQYNGKAELPHSVFHGHKQLATKIRLWHQQGERCLYTGKTISIHDLINNPNQFEVDHILPLSITFDDSLANKVLVYATANQEKGQRTPYQALDSMDDAWSFRELKAFVRESKTLSNKKKEYLLTEEDISKFDVRKKFIERNLVDTRYASRVVLNALQEHFRAHKIDTKVSVVRGQFTSQLRRHWGIEKTRDTYHHHAVDALIIAASSQLNLWKKQKNTLVSYSEDQLLDIETGELISDDEYKESVFKAPYQHFVDTLKSKEFEDSILFSYQVDSKFNRKISDATIYATRQAKVGKDKKDETYVLGKIKDIYTQDGYDAFMKIYKKDKSKFLMYRHDPQTFEKVIEPILENYPNKEMNEKGKEVPCNPFLKYKEEHGYIRKYSKKGNDPEIKSLKYYDSKLGNHIDITPKDSNNKVVLQSVSPWRADVYFNKTTGKYEILGLKYADLQFEKGTGTYKISQEKYNDIKKKEGVDSDSEFKFTLYKNDLLLVKDTETKEQQLFRFLSRTMPKQKHYVELKPYDKQKFEGGEALIKVLGNVANSGQCKKGLGKSNISIYKVRTDVLGNQHIIKNEGDKPKLDF

SEQ ID NO: 1313 - protein, 1122 aa, Streptococcus thermophilus
MSDLVLGLDIGIGSVGVGILNKVTGEIIHKNSRIFPAAQAENNVERRTNRQGRRLTRRKKHRRVRLNRLFEESGLITDFTKISINLNPYQLRVRGLTDELSNEELFIALKNMVKHRGISYLDDASDDGNSSVGDYAQIVKENSKQLETKTPGQIQLERYQTYGQLRGDFTVEKDGKKHRLINVFPTSAYRSEALRILQTQQEFNSQITDEFINRYLEILTGKRKYYHGPGNEKSRTDYGRYRTSGETLDNIFGILIGKCTFYPEEFRAAKASYTAQEFNLLNDLNNLTVPTETKKLSKEQKNQIINYVKNEKAMGPAKLFKYIAKLLSCDVADIKGYRIDKSGKAEIHTFEAYRKMKTLETLDIEQMDRETLDKLAYVLTLNTEREGIQEALEHEFADGSFSQKQVDELVQFRKASSSIFGKGWHNFSVKLMMELIPELYETSEEQMTILTRLGKQKTTSSSNKTKYIDEKLLTEEIYNPVVAKSVRQAIKIVNAAIKEYGDFDNIVIEMARETNEDDEKKAIQKIQKANKDEKDAAMLKAANQYNGKAELPHSVFHGHKQLATKIRLWHQQGERCLYTGKTISIHDLINNPNQFEVDHILPLSITFDDSLANKVLVYATANQEKGQRTPYQALDSMDDAWSFRELKAFVRESKTLSNKKKEYLLTEEDISKFDVRKKFIERNLVDTRYASRVVLNALQEHFRAHKIDTKVSVVRGQFTSQLRRHWGIEKTRDTYHHHAVDALIIAASSQLNLWKKQKNTLVSYSEDQLLDIETGELISDDEYKESVFKAPYQHFVDTLKSKEFEDSILFSYQVDSKFNRKLSDATIYATRQAKVGKDKKDETYVLGKIKDIYTQDGYDAFMKIYKKDKSKFLMYRHDPQTFEKVIEPILENYPNKEMNEKGKEVPCNPFLKYKEEHGYIRKYSKKGNGPEIKSLKYYDSKLLGNPIDITPENSKNKVVLQSLKPWRADVYFNKTTGKYEILGLKYADLQFEKKTGTYKISQEKYNGIMKEEGVDSDSEFKFTLYKNDLLLVKDTETKEQQLFRFLSRTMPNVKYYVELKPYSKDKFEKNESLIEILGSADKSGRCIKGLGKSNISIYKVRTDVLGNQHIIKNEGDKPKLDF

SEQ ID NO: 1314 - protein, 1388 aa, Streptococcus thermophilus
MTKPYSIGLDIGTNSVGWAVITDNYKVPSKKMKVLGNTSKKYIKKNLLGVLLFDSGITAEGRRLKRTARRRYTRRRNRILYLQEIFSTEMATLDDAFFQRLDDSFLVPDDKRDSKYPIFGNLVEEKAYHDEFPTIYHLRKYLADSTKKADLRLVYLALAHMIKYRGHFLIEGEFNSKNNDIQKNFQDFLDTYNAIFESDLSLENSKQLEEIVKDKISKLEKKDRILKLFPGEKNSGIFSEFLKLIVGNQADFRKCFNLDEKASLHFSKESYDEDLETLLGYIGDDYSDVFLKAKKLYDAILLSGFLTVTDNETEAPLSSAMIKRYNEHKEDLALLKEYIRNISLKTYNEVFKDDTKNGYAGYIDGKTNQEDFYVYLKNLLAEFEGADYFLEKIDREDFLRKQRTFDNGSIPYQIHLQEMRAILDKQAKFYPFLAKNKERIEKILTFRIPYYVGPLARGNSDFAWSIRKRNEKITPWNFEDVIDKESSAEAFINRMTSFDLYLPEEKVLPKHSLLYETFNVYNELTKVRFIAESMRDYQFLDSKQKKDIVRLYFKDKRKVTDKDIIEYLHAIYGYDGIELKGIEKQFNSSLSTYHDLLNIINDKEFLDDSSNEAIIEEIIHTLTIFEDREMIKQRLSKFENIFDKSVLKKLSRRHYTGWGKLSAKLINGIRDEKSGNTILDYLIDDGISNRNFMQLIHDDALSFKKKIQKAQIIGDEDKGNIKEVVKSLPGSPAIKKGILQSIKIVDELVKVMGGRKPESIVVEMARENQYTNQGKSNSQQRLKRLEKSLKELGSKILKENIPAKLSKIDNNALQNDRLYLYYLQNGKDMYTGDDLDIDRLSNYDIDHIIPQAFLKDNSIDNKVLVSSASNRGKSDDFPSLEVVKKRKTFWYQLLKSKLISQRKFDNLTKAERGGLLPEDKAGFIQRQLVETRQITKHVARLLDEKFNNKKDENNRAVRTVKIITLKSTLVSQFRKDFELYKVCEINDFHHAHDAYLNAVIASALLKKYPKLEPEFVYGDYPKYNSFRERKSATEKVYFYSNIMNIFKKSISLADGRVIERPLIEVNEETGESVWNKESDLATVRRVLSYPQVNVVKKVEEQNHGLDRGKPKGLFNANLSSKPKPNSNENLVGAKEYLDPKKYGGYAGISNSFAVLVKGTIEKGAKKKITNVLEFQGISILDRINYRKDKLNFLLEKGYKDIELIIELPKYSLFELSDGSRRMLASILSTNNKRGEIHKGNQIFLSQKFVKLLYHAKRISNTINENHRKYVENHKKEFEELFYYILEFNENYVGAKKNGKLLNSAFQSWQNHSIDELCSSFIGPTGSERKGLFELTSRGSAADFEFLGVKIPRYRDYTPSSLLKDATLIHQSVTGLYETRIDLAKLGEG

SEQ ID NO: 1315 - protein, 1388 aa, Streptococcus thermophilus
MTKPYSIGLDIGTNSVGWAVITDNYKVPSKKMKVLGNTSKKYIKKNLLGVLLFDSGITAEGRRLKRTARRRYTRRRNRILYLQEIFSTEMATLDDAFFQRLDDSFLVPDDKRDSKYPIFGNLVEEKAYHDEFPTIYHLRKYLADSTKKADLRLVYLALAHMIKYRGHFLIEGEFNSKNNDIQKNFQDFLDTYNAIFESDLSLENSKQLEEIVKDKISKLEKKDRILKLFPGEKNSGIFSEFLKLIVGNQADFRKCFNLDEKASLHFSKESYDEDLETLLGYIGDDYSDVFLKAKKLYDAILLSGFLTVTDNETEAPLSSAMIKRYNEHKEDLALLKEYIRNISLKTYNEVFKDDTKNGYAGYIDGKTNQEDFYVYLKNLLAEFEGADYFLEKIDREDFLRKQRTFDNGSIPYQIHLQEMRAILDKQAKFYPFLAKNKERIEKILTFRIPYYVGPLARGNSDFAWSIRKRNEKITPWNFEDVIDKESSAEAFINRMTSFDLYLPEEKVLPKHSLLYETFNVYNELTKVRFIAESMRDYQFLDSKQKKDIVRLYFKDKRKVTDKDIIEYLHAIYGYDGIELKGIEKQFNSSLSTYHDLLNIINDKEFLDDSSNEAIIEEIIHTLTIFEDREMIKQRLSKFENIFDKSVLKKLSRRHYTGWGKLSAKLINGIRDEKSGNTILDYLIDDGISNRNFMQLIHDDALSFKKKIQKAQIIGDEDKGNIKEVVKSLPGSPAIKKGILQSIKIVDELVKVMGGRKPESIVVEMARENQYTNQGKSNSQQRLKRLEKSLKELGSKILKENIPAKLSKIDNNALQNDRLYLYYLQNGKDMYTGDDLDIDRLSNYDIDHIIPQAFLKDNSIDNKVLVSSASNRGKSDDFPSLEVVKKRKTFWYQLLKSKLISQRKFDNLTKAERGGLLPEDKAGFIQRQLVETRQITKHVARLLDEKFNNKKDENNRAVRTVKIITLKSTLVSQFRKDFELYKVREINDFHHAHDAYLNAVIASALLKKYPKLEPEFVYGDYPKYNSFRERKSATEKVYFYSNIMNIFKKSISLADGRVIERPLIEVNEETGESVWNKESDLATVRRVLSYPQVNVVKKVEEQNHGLDRGKPKGLFNANLSSKPKPNSNENLVGAKEYLDPKKYGGYAGISNSFAVLVKGTIEKGAKKKITNVLEFQGISILDRINYRKDKLNFLLEKGYKDIELIIELPKYSLFELSDGSRRMLASILSTNNKRGEIHKGNQIFLSQKFVKLLYHAKRISNTINENHRKYVENHKKEFEELFYYILEFNENYVGAKKNGKLLNSAFQSWQNHSIDELCSSFIGPTGSERKGLFELTSRGSAADFEFLGVKIPRYRDYTPSSLLKDATLIHQSVTGLYETRIDLAKLGEG

SEQ ID NO: 1316 - protein, 595 aa, Streptococcus thermophilus
MVQFRKANSSIFGKGWHNFSVKLMMELIPELYETSEEQMTILKRLGKQKTTSSSNKTKYIDEKLLTEEIYNPVVAKSVRQAIKIVNAAIKEYGDFDNIVIEMARETNEDDEKKAIQKIQKANKDEKDAAMLKAANQYNGKAELPHSVFHGHKQLATKIRLWHQQGERCLYTGKTISIHDLINNPNQFEVDHILPLSITFDDSLANKVLVYATANQEKGQRTPYQALDSMDDAWSFRELKAFVRESKTLSNKKKEYLLTEEDISKFDVRKKFIERNLVDTRYASRVVLNALQEHFRAHKIDTKVSVVRGQFTSQLRRHWGIEKTRDTYHHHAVDALIIAASSQLNLWKKQKNTLVSYSEDQFLDIETGELISDDEYKESVFKAPYQHFVDTLKSKEFEDSILFSYQVDSKFNRKISDATIYATRKAKLDKEKKEYTYTLGKIKDIYTQAGYDAFIKIYKKDKSKFLMYHHDPQTFEKVIEPILENYPNKEINEKGKEVPCNPFLKYKEEHGYIRKYSKKGNGPEIKSFKYYDNLLGRHIDITPKNSKNIVALRKLNPWRTDVYFNHETMKYEFLGLKYADISYKKSKNKAGDFLPK

SEQ ID NO: 1317 - protein, 1388 aa, Streptococcus thermophilus]
MTKPYSIGLDIGTNSVGWAVITDNYKVPSKKMKVLGNTSKKYIKKNLLGVLLFDSGITAEGRRLKRTARRRYTRRRNRILYLQEIFSTEMATLDDAFFQRLDDSFLVPDDKRDSKYPIFGNLVEEKVYHDEFPTIYHLRKYLADSTKKADLRLVYLALAHMIKYRGHFLIEGEFNSKNNDIQKNFQDFLDTYNAIFESDLSLENSKQLEEIVKDKISKLEKKDRILKLFPGEKNSGIFSEFLKLIVGNQADFRKCFNLDEKASLHFSKESYDEDLETLLGYIGDDYSDVFLKAKKLYDAILLSGFLTVTDNETEAPLSSAMIKRYNEHKEDLALLKEYIRNISLKTYNEVFKDDTKNGYAGYIDGKTNQEDFYVYLKNLLAEFEGADYFLEKIDREDFLRKQRTFDNGSIPYQIHLQEMRAILDKQAKFYPFLAKNKERIEKILTFRIPYYVGPLARGNSDFAWSIRKRNEKITPWNFEDVIDKESSAEAFINRMTSFDLYLPEEKVLPKHSLLYETFNVYNELTKVRFIAESMRDYQFLDSKQKKDIVRLYFKDKRKVTDKDIIEYLHAIYGYDGIELKGIEKQFNSSLSTYHDLLNIINDKEFLDDSSNEAIIEEIIHTLTIFEDREMIKQRLSKFENIFDKSVLKKLSRRHYTGWGKLSAKLINGIRDEKSGNTILDYLIDDGISNRNFMQLIHDDALSFKKKIQKAQIIGDEDKGNIKEVVKSLPGSPAIKKGILQSIKIVDELVKVMGGRKPESIVVEMARENQYTNQGKSNSQQRLKRLEKSLKELGSKILKENIPAKLSKIDNNALQNDRLYLYYLQNGKDMYTGDDLDIDRLSNYDIDHIIPQAFLKDNSIDNKVLVSSASNRGKSDDFPSLEVVKKRKTFWYQLLKSKLISQRKFDNLTKAERGGLLPEDKAGFIQRQLVETRQITKHVARLLDEKFNNKKDENNRAVRTVKIITLKSTLVSQFRKDFELYKVREINDFHHAHDAYLNAVIASALLKKYPKLEPEFVYGDYPKYNSFRERKSATEKVYFYSNIMNIFKKSISLADGRVIERPLIEVNEETGESVWNKESDLATVRRVLSYPQVNVVKKVEEQNHGLDRGKPKGLFNANLSSKPKPNSNENLVGAKEYLDPKKYGGYAGISNSFAVLVKGTIEKGAKKKITNVLEFQGISILDRINYRKDKLNFLLEKGYKDIELIIELPKYSLFELSDGSRRMLASILSTNNKRGEIHKGNQIFLSQKFVKLLYHAKRISNTINENHRKYVENHKKEFEELFYYILEFNENYVGAKKNGKLLNSAFQSWQNHSIDELCSSFIGPTGSERKGLFELTSRGSAADFEFLGVKIPRYRDYTPSSLLKDATLIHQSVTGLYETRIDLAKLGEG

SEQ ID NO: 1318 - protein, 1038 aa, Streptococcus vestibularis
MIDELSNEELFIALKNMVKHRGISYLDDASDDGNSSVGDYAQIVKENSKQLETKTPGQIQLERYQKYGQLRGDFTVEEDGKKHRLINVFPTSAYRAEALRILQTQQEFNSQITDEFINRYLEILTGKRKYYHGPGNEKSRTDYGRYRTSGETLDNIFGILIGKCTFYPEEFRAAKASYTAQEFNLLNDLNNLTVPTETKKLSEEQKNQIINYVKNEKAMGPAKLFKYIAKLLSCDIADIKGYRIDKSDKAEIHTFEAYRKMKTLETIDIEKMSREELDKLAYVLTLNTEREGIQEALEHEFVDGNFSQEQIDELVQFRKANSSIFGKGWHNFSVKLMMELIPELYATSEEQMTILTRLGKQKTTSSSNKTKYIDEKLLTEEIYNPVVAKSVRQAIKIVNAAIKEYGDFDNIVIEMARATNEDDEKKAIQKIQKANKDEKDAAMLKAANQYNGKAELPHSVFHGHKQLATKIRLWHQQGERCLYTGKTISIHDLINNPNQFEIDHILPLSITFDDSLANKVLVYATANQEKGQRTPYQALDSMDDAWSFRELKAFVRESKTLSNKKKEYLLTEEDISKFDVRKKFIERNLVDTRYASRVVLNALQEHFRAHKIDTKVSVVRGQFTSQLRRHWGIEKTRDTYHHHAVDALIIAASSQLNLWKKQKNTLVNYSENQLLDIETGELISDDEYKESVFKAPYQHFVDTLKSKEFEDSILFSYQVDSKFNRKISDATIYATRKAKLDKEKKEYTYTLGKIKDIYALGTKTPSKTGFYKFLDLYKKNKSQFLMYQKDRKTWDEVIEKILEQYRPFKEKDKNGKEVDFNPFEKYRIENGPIRKYSRKGNGPEIKSLKYYDNLLGRFVDITPSESKNPVALLSLNPWRTDVYYNTETRKYEFLGLKYADLCFEKGGSYGISKVKYNKIREKEGIGKNSEFKFTLYKNDLILIKDTETNRQQVFRFWSRTGKDNPKRFEKHKIELKPYEKARFEKGEELEVLGKVPPSSNQLQKNMQIENLSIFKVRTDVLGNQHIIKNEGDKPKLDF

SEQ ID NO: 1319 - protein, 97 aa, Streptococcus vestibularis
MSDLVLGLDIGIGSVGVGILNKVTGEIIHKNSRIFPAAQAENNVERRTNRQGRRLTRRKKHRRVRLNHLFEESGLITDFTKVSINLNPYQLRVKIDR

SEQ ID NO: 1320 - protein, 1084 aa, Subdoligranulum sp.
MKNTLYGIGLDIGVASVGWAVVGLNGTGEPVGLHRLGVRIFDKAEQPKTGESLAAPRRMARGMRRRLRRKALRRADVYALLERSGLSTREELAQMFEAGGLEDIYALRTRALDEPVGKAEFSRILLHLAQRRGFKSNRRTASDGEDGRLLAAVNENRRRMAQGGWRTVGEMLYRHEAFALHKRNKADDYLSTVGRDMVAEEASILFERQRAMGCSWAAPELQAEYLSILLRQRSFDEGPGGNSPYGGNQVEKMVGRCTFEPDEPRAAKAAYSFEYFSLLQKLNHIRLAENGETRPLTQPQRQQLLSLAHKTPDISLARIRKELALPETVQFNGVRCRANETLEESEKKEKFACLPAYHKMRKALDGVVKGRISSLSISQRDAAATALSLYKNEDTLRAKLTEAGFQAPEIDALAGLTGFSKFGHLSLKACRKLIPHLEQGLTYDQACTAAGYDFKGHGAGERAFTLPAAAPEMEQITSPVVRRAVAQTIKVVNGIIREMDASPAWVRIELARELSKTFGERQEMDRSMRENAAQNERLMQELRDTFHLLSPTGQDLVKYRLWKEQDGVCAYSLRRLDVERLFEPGYVDVDHIVPYSLSFDDRRSNKVLVLSSENRQKGNRLPLQYLQGKRREDFIVWTNSSVHDYRKRQNLLREKLSGDEAEGFRQRNLQDTQHMARFLYNYISDHLAFAQSEALGKKRVFAVSGAVTSHLRKRWGLSKVRADGDLHHALDAAVVACTTDGMIRRISGYYGHIEGEYLQDADGAGSQHARTKERFPAPWPRFRDELIVRLSEQPAEPLLDINPEFYCEYGTEHIRPVFVSRMPRRKVTGPGHKETIKGAAAADEGLLTVRKALTELKLDKDGEIKDYYMPSSDTLLYEALKAQLRRFGGDGKKAFAEPFYKPKADGTPGPLVRKVKTTEKATLTVPVHGGAASNDTMVRVDVFLVPGDGYYWVPVYTADTLKPELPNRAVVQGKPYSEWKEMREEDFIFSLYPNDLVYVEHKSGLKFTLQNADSTLEKTRTQTSAFAYFVSGSISTASITIRTHDNAYGIPSLGVKTLKTFHKYQVDVLGNVFPVHKETRQKFR

SEQ ID NO: 1321 - protein, 951 aa, Sutterella parvirubra
MPTVRPVFHSSASFDLGAKNTGLFLVNHPAGAAPSAEYAAAYTIVQPADGDGLNYSTTNRRAVRHRLRGGKRFKLARRLVLQVIDALRKLKPGLIRDEEMRRTVEALSSLLKRRGFTRIESEAQVDPTTLDSVDPAVFADHETLGGFFSLGIPISTQWDALSQNPGAVEQLFKALPSAKDFGKYVTEQFPEFAEQKKLYADAIKVLSSEAKSIVMQLGLGHHHRSKYFEMIAHDMLRDPRLQGVFELFGSEERFKTFICNVSNLQLRALRWYFDEPNPEVANQWNPEKFQVVWLRGLKYFHPDAERKADMKKLIDELTASKDILDALCTTDPRRTIPPYEDQNNRRPPFDQTLWLSAAELTRRYGDKWRIWSQKFERADRALSTGLDEILLYTDRRSRMFNRNQDPSVYADSYVLQRVLDRSSKLDRYALRALAAGYRTQELHEPLATLSDTLGTQHVETFLTFAAEYYEEVAAAKNGLWLDGPSRLLERADIHPPMKKKVLDLLLGNILDATPEIGRILRTVLWNRHVHEKSRSTPASLCRSIEAIRKDFGGEFRMRYDALDAKIRAAEDQKKKFKPTNAEEKDLFKAWNATKTMHAFLRDVLQLTPKQLERTASPYVFAQLHTLIDTERDGFTSTSLAAHLENHWRMRANAAGMAQCSRLPADAVRPFDGVLSKALDRQAFEAAKLAAQHLMSRKELTDTDIRYSIIIESNRFAFSASTAELKKNTLAKKNAEKGLNFELKRWQDKDSRIREASRGICAYTGAKLGDVVEYDHIIPRAFTTSAMGSVFNSEANLICVSRPGNQTKADKRYGLNKLHKTYLTAVFGTADVTTIAASIEDIVGKLASANRLRHFELLNEKEQDAVRHALFLDDESDARRIVLRELAAQNKSRVNGTQAWFVRAFMTKLLEITKDWRERTGNTLDIRSWKTDAEVASRLRSALNFHAEITLT

SEQ ID NO: 1322 - protein, 406 aa, Sutterella parvirubra
SNLFREEVPYGDHFLPIIQMKNRIYIGYQLPKADGTGGNAVAVLGKDPLELLETLKPFLDREPQAFSDHPVTYKMINERAYELLTKCALTPDQTTELERTQAEVLRSLNYQTSRAAVLGRLVDDKNKFVAKDAVWKEKDFVISFKLSPKKSAFKASGQLELPAKSDWKALVDSPELAINWGQPADDTFSQRIERKVRMNSSHLEHTPKKRVVSLPVVDKPSGGFRIRRHNLDGSAVFQVHTVANNKYGGFSADSAGKVDWSTPVLCGHLQHANLVPLDPETASAEQLVRMSEWRVVETTSDIRLEVCPGTSGRRYVRVELPFTLLQEWLTAGKVADVPVSPLHLPGSIKLTDPKTFCAEAQKTLSIFAQPRATIFFEQLGDRVRFRFEASGGPATMNAAYNAAGRS

SEQ ID NO: 1323 - protein, 389 aa, Sutterella wadsworthensis
MKACDLEEKTNHLQACVAIDLGARYTGTFSILHKSSHLPSKDDCRAATYVLPEDGGKMTYSQRNRTAVRHRIRGKKRFALARRMAMLIIREKLAAKSVTLTSSETRRLAEAVGSLLRRRGYNRLETETDNDLTVLENIEPEVFSEHEILGKYFYAGTDLAIQWETLSQDLSKISSLLAERLSEKDFKKYLTGLIPDDKNKIKHIISVFKMLIDEAESINMQCVLGHKHRTQYLSDIHADMHRDTRLSKAAEAFGGVDRLWRLLGNLSNLQLRAHRWYFNAPHLFDDQALEPARLQKTLVRAFKYLHCPQGVESRAQAELVKELEEADDIIDALCTIDPVRTIPPYENQQNRRPPFDQTLYLSPDLGVSGFLCLGRLFQGQPNEAALCFL

SEQ ID NO: 1324 - protein, 976 aa, Tannerella sp.
MKKILGLDLGSNSIGWALVNEAENRDEASSIIKLGVRVNPLTVDEMQNFEKGKSITTNADRTLKRSMRRNLQRYKLRRDALIKLLKKVGFITDGTILSEQGNRTTFETYRLRAKAPDEEISLQELARVLLMINKKRGYKSSRKIKEKEAGTLIDGMEVAKKLYDEDLTPGQLCLQLLESGKKSLPDFYSSDLQEEFDRIWNFQKQFNPKAFCDTAKEEIKGKNKSQTWAILAKYFIWMEEMDVWNEKESKTERVEKECKLVGLKRTVKKEEQRKENYCWRVQALTEQLDLEKVAVVLQEINGQISTSSGYLGAISDRSKVLYFNRQTVGQYQMAELEKNPNTSLRNMVFYRQDYLDEFDKIWEKQAEFHKELTVELKKEIRDIIIFYQRRLKSQKGLIGFCEFENREIMVEKNGKMQAKVVGCKVIPRSHPLFQEFKIWQTLNNVEVFAGEKKCKRKRTDAFPGLFDGTEDTLMVEGWRYLYQEEKEILAKELSVKKSLKKEYILKLLFDNPQDLDMNFEQIEGNDTGNVLFSAYSKMIEKYGYEPLDFGKPTDKIIEQLQVIFADLGWNTDLLFVDLNKEGKDLEKQPYFKLWHLLYSFEGDNTPTGNGKLVEKLMELCHVGKECALELVNISFQNDYGSLSAKAIKKILPYLKEGNRYDVACGYAGYRHSKSSLTKEEIENKVLKDKLDILPKNSLRNPVVEKILNQMVNVINAIIDTYGKPDEIRVELARELKKSAKEREELTKAIAKSTREHEEIRKVLQEEFGMINVSRNDIIRYKLYKELKDNGYKTLYSNQDIPKEKVFSKEIDIEHIIPQARLFDDSLSNKTLEYKAINIEKGNKTAYDFVKEKYGEKGLQQYLNRCESLFKGHRTKLRKLKMGQENIPEGFIDRDLRNTQYIAKKALAMLNEICRRVVATTGSITDRLREDWQLVDVLKELRCFRYFKDTKMKANHNKNIFYTSIKVDVSDTSKILK

SEQ ID NO: 1325 - protein, 1049 aa, Tistrella mobilis
MINERLTFGIDLGIGSCGWAVLRHADAAGEPGVIEGLGSWCFDVPETSKERIPTNQVRRSNRLLRRVIRRRRNRMAEIRRLFHAQGLLPSADEDALKRPRLDPWELRARGLDQCLSAEEFAVALGHIARHRGFRSSAKRKAANTSGEDSKMLSALLVTRERTARYRTVGEMFARDPEYSARRRNRDGIFDRTVARDDLIHEVGKLFEAQRARGSAFASPDLEADFNAIAFRQAEMQDSERLVGNCPFERDEKRAARWAPSFERFRLLTRLINLRIATAEGERRFTPEDLARVSAELGATAKLPVSRVRALIGLLPDERFTTIRVEDEDRDIVARTGEAAPGTWRLRKTLGEALWAEMQARPDQLDAIAHVLSFFEATAKIRSELDRLGLPAAVIEALDRGLEDGAFAKFKGAGHISAKACRNLLPHLQQGHRYDQACRLAGYDHAASTLSHTAQVVSKAGFNALVTELGESIANPIARKALTEGLKQIRAMCARWGLPGAIHIELAREVGNSIEKRRELESQRETTTKRRQTERDEIRGLLALEDVDDDTLLRYRLWKEQGGKCLYTGKDIHVRQLIATDNSVQVDHILPWSRFGDDSFNNKTLCLASANQRKRGQTPWEWFSLTGTPEAWEVFASRVETSKDLRGFKKRNLLLKNADEVAQRFRSRNLNDTRYAARLLAEAAKLFYPAGDRQEKDGRRRVLTRPGPLTAALRHAWGLESLKKADGKRVSDDRHHALDALAVAAISEREVQRLTRSFQEWEQQGLARPLRHVAPPWPGFRGDVLAAYAQAFVARPERRRARGKGHDASIRQVVGEGPEAQVFERRGLADLKEADLDRVKDPERNQAIIEAVRAWILAGRPADAPPRSPRGDVIVKLRTAPAKKIKPAVPVRGGTADRGDMVRIDVFTRPNRKGRDEWYLVPIYPHQVMNRKAWPHPPMRSVVAYKDEAGWTEIGAEHSFRFSLYPRSYVQLVKSNGDVIEGYLVSMDRSTGAFRVFVHNNPAEMAKGIGAKTLLNLRKFNVDRFGVRTEVKSEVRTWHGEVCTSPVPPD

SEQ ID NO: 1326 - protein, 1395 aa, Treponema denticola
MKKEIKDYFLGLDVGTGSVGWAVTDTDYKLLKANRKDLWGMRCFETAETAEVRRLHRGARRRIERRKKRIKLLQELFSQEIAKIDEGFFQRMKESPFYAEDKTILQENALFNDKDFTDKTYHKAYPTINHLIKAWIENKVKPDPRLLYLACHNIIKKRGHFLFEGDFDSENQFDTSIQALFEYLREDMEVDIDADSQKVKEILKDSSLKNSEKQSRLNKILGLKPSDKQKKAITNLISGNKINFADLYDNPDLKDAEKNSISFSKDDFDALSDDLASILGDSFELLLKAKAVYNCSVLSKVIGDEQYLSFAKVKIYEKHKTDLTKLKAVIKKHFPNNYKKVFGYNQDNESKNNYSGYVGVCKTKNKKLVINNSVNQEDFYKFLKPILSAKSEIKEVNDILAEIETGNFLPKQISKSNAEIPYQLRKMELEKILSNAEKHFSFLKQKDEKGLSHSEKIIMLLTFKIPYYIGPINDNHKKSFPDRCWVVKKEKSPSGKTTPWNFFDHIDKEKTAEEFITSRTNFCTYLIGESVLPKNSLLYSEYTVLNEINNLQIIIDGKNICDTKLKQKIYEDLFKKYKKITQKQISTFIKHEGICNKTDEVIILGIDKECTSSLKSYIELKNIFGKQVDEISTKNMLEEIIRWATIYDEGEGKTILKTKIKAEYGKYCSDEQIKKILNLKFSGWGRLSRKFLETVTSEMPGFSEPVNIITAMRETQNNLMELLSSEFKFTENIKKINSGFEDAEKQFSYDGLVKPLFLSPSVKKMLWQTLKLVKEISHITQAPPKKIFIEMAKGAELEPARTKTRLKILQDLYSSCKNDADAFSSEIQYLSGKIENEDNLRLRSDKLYLYYTQLGKCMYCGKPIEIGHVFDTSNYDIDHIYPQSKIKDDSISNRVLVCSSCNKNKEDKYPLKSEIQSKQRGFWNFLQRNNFISLEKLNRLTRTTPISDDETAKFIARQLVETRQATKVAAKVLEKMFPETKIVYSKAETVSMFRNKFDIIKCREINDFHHAHDAYLNIVVGNVYNTKFTNNPWNFIKEKRDNPKIADTYNYYKVFDYDVKRNNITAWEKGKTIITVKDMLKRNTPIYTRQAACKKGGLFDQTIMKKGLGQHPLKKEGPFSNISKYGGYNKVSAAYYTLIEYEEKGNKIRSLETIPLYLVKDIQKDQDVLKSYLTDLLGKKEFKILVPKIKINSLLKINGFPCHITGKTNDSFLLRPAVQFCCSNDEVLYFKKIIRFSEIRSQREKIGKTISPYEDLSFRSYIKENLCKKTKNDEIGEKEFYDLLQKKNLEIYDMLLTKHKDTIYKKRPNSATIDILVKGKEKFKSLIIENQFEVILEILKLFSATRNVSELQHIGGSKYSGVAKIGNKISSLDNCILIYQSITGIFEKRIDLLKV

SEQ ID NO: 1327 - protein, 769 aa, Treponema denticola
MKKEIKDYFLGLDVGTGSVGWAVTDTDYKLLKANRKDLWGMRCFETAETAEVRRLHRGARRRIERRKKRIKLLQELFSQEIAKIDEGFFQRMKESPFYAEDKTILQENALFNDKDFTDKTYHKAYPTINHLIKAWIENKVKPDPRLLYLACHNIIKKRGHFLFEGDFDSENQFDTSIQALFEYLREDMEVDIDADSQKVKEILKDSSLKNSEKQSRLNKILGLKPSDKQKKAITNLISGNKINFADLYDNPDLKDAEKNSISFSKDDFDALSDDLASILGDSFELLLKAKAVYNCSVLSKVIGDEQYLSFAKVKIYEKHKTDLTKLKAVIKKHFPNNYKKVFGYNQDNESKNNYSGYVGVCKTKNKKLVINNSVNQEDFYKFLKPILSAKSEIKEVNDILAEIETGNFLPKQISKSNAEIPYQLRKMELEKILSNAEKHFSFLKQKDEKGLSHSEKIIMLLTFKIPYYIGPINDNHKKSFPDRCWVVKKEKSPSGKTTPWNFFDHIDKEKTAEEFITSRTNFCTYLIGESVLPKNSLLYSEYTVLNEINNLQIIIDGKNICDTKLKQKIYEDLFKKYKKITQKQISTFIKHEGICNKTDEVIILGIDKECTSSLKSYIELKNIFGKQVDEISTKNMLEEIIRWATIYDEGEGKTILKTKIKAEYGKYCSDEQIKKILNLKFSGWGRLSRKFLETVTSEMPGFSEPVNIITAMRETQNNLMELLSSEFKFTENIKKINSGFEDAEKQFSYDGLVKPLFLSPSVKKCCGRL

SEQ ID NO: 1328 - protein, 1395 aa, Treponema denticola
MKKEIKDYFLGLDVGTGSVGWAVTDTDYKLLKANRKDLWGMRCFETAETAEVRRLHRGARRRIERRKKRIKLLQELFSQEIAKIDEGFFQRMKESPFYAEDKTILQENALFNDKDFTDKTYHKAYPTINHLIKAWIENKVKPDPRLLYLACHNIIKKRGHFLFEGDFDSENQFDTSIQALFEYLREDMEVDIDADSQKVKEILKDSSLKNSEKQSRLNKILGLKPSDKQKKAITNLISGNKINFADLYDNPDLKDAEKNSISFSKDDFDALSDDLASILGDSFELLLKAKAVYNCSVLSKVIGDEQYLSFAKVKIYEKHKTDLTKLKAVIKKHFPNNYKKVFGYNQDNESKNNYSGYVGVCKTKNKKLVINNSVNQEDFYKFLKPILSAKSEIKEVNDILAEIETGNFLPKQISKSNAEIPYQLRKMELEKILSNAEKHFSFLKQKDEKGLSHSEKIIMLLTFKIPYYIGPINDNHKKSFPDRCWVVKKEKSPSGKTTPWNFFDHIDKEKTAEEFITSRTNFCTYLIGESVLPKNSLLYSEYTVLNEINNLQIIIDGKNICDTKLKQKIYEDLFKKYKKITQKQISTFIKHEGICNKTDEVIILGIDKECTSSLKSYIELKNIFGKQVDEISTKNMLEEIIRWATIYDEGEGKTILKTKIKAEYGKYCSDEQIKKILNLKFSGWGRLSRKFLETVTSEMPGFSEPVNIITAMRETQNNLMELLSSEFKFTENIKKINSGFEDAEKQFSYDGLVKPLFLSPSVKKMLWQTLKLVKEISHITQAPPKKIFIEMAKGAELEPARTKTRLKILQDLYSSCKNDADAFSSEIQYLSGKIENEDNLRLRSDKLYLYYTQLGKCMYCGKPIEIGHVFDTSNYDIDHIYPQSKIKDDSISNRVLVCSSCNKNKEDKYPLKSEIQSKQRGFWNFLQRNNFISLEKLNRLTRTTPISDDETAKFIARQLVETRQATKVAAKVLEKMFPETKIVYSKAETVSMFRNKFDIIKCREINDFHHAHDAYLNIVVGNVYNTKFTNNPWNFIKEKRDNPKIADTYNYYKVFDYDVKRNNITAWEKGKTIITVKDMLKRNTPIYTRQAACKKGELFNQTIMKKGLGQHPLKKEGPFSNISKYGGYNKVSAAYYTLIEYEEKVNKIRSLETIPLYLVKDIQKDQDVLKSYLTDLLGKKEIKILVPKIKINSLLKINGFPCHITGKTGDSFVLRPAVQFCCSNDEVLYFKKIIRFNEIRSQREKMGKTISPYEDLSFRSYIKENLCKKTKADEIGEKEFYDLLQKKNLEIYDMLLTKHKDTIYNKRPNSTTLGMLTKGRYEFINLKPKDQIIVMLEILKLFCTTREAIDLGLIKGKPAAGVATLGKKISNLDNCILIYQSITGIFEKRIDLLKV

SEQ ID NO: 1329 - protein, 1395 aa, Treponema denticola
MKKEIKDYFLGLDVGTGSVGWAVTDTDYKLLKANRKDLWGMRCFETAETAEVRRLHRGARRRIERRKKRIKLLQELFSQEIAKIDEGFFQRMKESPFYAEDKTILQENTLFNDKDFTDKTYHKAYPTINHLIKAWIENKVKPDPRLLYLACHNIIKKRGHFLFEGDFDSENQFDTSIQALFEYLREDMEVDIDADSQKVKEILKDSSLKNSEKQSRLNKILGLKPSDKQKKAITNLISGNKINFADLYDNPDLKDAEKNSISFSKDDFDALSDDLASILGDSFELLLKAKAVYNCSVLSKVIGDEQYLSFAKVKIYEKHKTDLTKLKNVIKKHFPKDYKKVFGYNKNEKNNNNYSGYVGVCKTKSKKLIINNSVNQEDFYKFLKTILSAKSEIKEVNDILTEIETGTFLPKQISKSNAEIPYQLRKMELEKILSNAEKHFSFLKQKDEKGLSHSEKIIMLLTFKIPYYIGPINDNHKKSFPDRCWVIKKEKSPSGKTTPWNFFDHIDKDKTAEAFITSRTNFCTYLVGESVLPKSSLLYSEYTVLNEINNLQIIIDGKNICDIKLKQKIYEELFKKYKKITQKQISTFIKHEGICNKTDEVIILGIDKECTSSLKSYIELKNIFGKQVDEISTKNMLEEIIRWATIYDEGEGKTILKTKIKAEYGKYCSDEQIKKILNLKFSGWGRLSRKFLETVTSEMPGFSEPVNIITAMRETQNNLMELLSSEFKFTENIKKINSGFEDAEKQFSYNGLVKPLFLSPSVKKMLWQTLKLVKEISHITQAPPKKIFIEMAKGAELEPARTKTRLKILQDLYNNCKNDADAFSSEIKDLSGKIENEDNLRLRSDKLYLYYTQLGKCMYCGKPIEIGHVFDTSNYDIDHIYPQSKIKDDSISNRVLVCSSCNKNKEDKYPLKSEIQSKQRGFWNFLQRNNFISLEKLNRLTRTTPISDDETAKFIARQLVETRQATKVAAKVLEKMFPETKIVYSKAETVSMFRNKFDIIKCREINDFHHAHDAYLNIVVGNVYNTKFTNNPWNFIKEKRDNPKIADTYNYYKVFDYDVKRNNITAWEKGKTIITVKDMLKRNTPIYTRQAACKKGGLFDQTIMKKGLGQHPLKKEGAFSNISKYGGYNKVSAAYYTLIEYEEKGNKIRSLETIPLYLVKDIQKDQDVLKSYLTDLLGKKEIKILVPKIKINSLLKINGFPCHITGKTGDSFVLRPAVQFCCSNDEVLYFKKIIRFNEIRSQREKMGKTISPYEDLSFRSYIKENLCKKTKADEIGEKEFYDLLQKKNLEIYDMLLTKHKDTIYNKRPNSTTLGMLTKGRYEFINLKPKDQIIVMLEILKLFCTTREAIDLGLIKGKPAAGVATLGKKISNPDNCILIYQSITGIFEKRIDLLKV

SEQ ID NO: 1330 - protein, 1395 aa, Treponema denticola
MKKEIKDYFLGLDVGTGSVGWAVTDTDYKLLKANRKDLWGMRCFETAETAEVRRLHRGARRRIERRKKRIKLLQELFSQEIAKIDEGFFQRMKESPLYAEDKTILQENTLFNDKDFTDKTYHKAYPTINHLIKAWIENKVKPDPRLLYLACHNIIKKRGHFLFEGDFDSENQFDTSIQALFEYLREDMELDIDADSQKVKEILKDSSLKNSEKQSRLNKMLGLKPSDKQKKAITNLISGNKINFADLYDNPDLKDAEKNSISFSKDDFDALSDDLASILGDSFELLLKAKAVYNCSVLSKVIGDEQYLSFAKVKIYEKHKTDLTKLKNVIKKHFPKDYKKVFGYNKNEKNNNNYSAYVGVCKITHKKLVIKNSASQEDFYKFLKTILSAKSEIKEVNDILTEIETGTFLPKQISKSNAEIPYQLRKMELEKILSNAEKHFSFLKQKDEKGLSHSEKIIMLLTFKIPYYIGPINDNHKKSFPDRCWVVKKEKSPSGKTTPWNFFDHIDKEKTAEEFITSRTNFCTYLIGESVLPKSSLLYSEYTVLNEINNLQIIIDGKNICDIKLKQKIYEELFKKYKKITQKQISTFIKHEGICNKTDEVIILGIDKECTSSLKSYIELKNIFGKQVDEISTKNMLEEIIRWATIYDEGEGKTILKTKIKAEYGKYCSDEQIKKILNLKFSGWGRLSRKFLETVTSEMPGFSEPVNIITAMRETQNNLMELLSSEFKFTENIKKINSGFEDAEKQFSYNGLVKPLFLSPSVKKMLWQTLKLVKEISHITQAPPKKIFIEMAKGAELEPARTKTRLKILQDLYSSCKNDADAFSSEIQYLSGKIENEDNLRLRSDKLYLYYTQLGKCMYCGKPIEIGHVFDTSNYDIDHIYPQSKIKDDSISNRVLVCSSCNKNKEDKYPLKAEIQSKQRGFWNFLQRNNFISLEKLNRLTRTSPISDDETAKFIARQLVETRQATKVAAKVLEKMFPETKIVYSKAETVSMFRNKFDIIKCREINDFHHAHDAYLNIVVGNVYNTKFTNNPWNFIKEKRDNPKIADTYNYYKVFDYDVKRNNITAWEKGKTIITVKDMLKRNTPIYTRQAACKKGELFNQTIMKKGLGQHPLKKEGPLSNISKYGGYNKVSAAYYTLIEYEEKGSKIRSLETIPLYLVKDIQKNKDGLKSYLTDQIGKKEIKILIPKIKINSLLKINGFPCHITGKMGEAFVLRPAVQFCCSNDEALYFKKIIRFNEIRKQREKMGKTISPYEDLSFRSYIKDNLCKKTKADEIEEKEFYDLLQKKNLEIYDMLLTKHKDTIYKKRPNSATIDILVKGKEKFKSLIIENQFEVILEILKLFSATRNVSDLQHIGGSKNAGNARVGNKISSLDNCILIYQSITGIFEKRIDLLKI

SEQ ID NO: 1331 - protein, 1395 aa, Treponema denticola
MKKEIKDYFLGLDVGTGSVGWAVTDTDYKLLKANRKDLWGMRCFETAETAEVRRLHRGARRRIERRKKRIKLLQELFSQEIAKIDEGFFQRMKESPLYAEDKTILQENTLFNDKDFTDKTYHKAYPTINHLIKAWIENKVKPDPRLLYLACHNIIKKRGHFLFEGDFDSENQFDTSIQALFEYLREDMEVDIDADSQKVKEILKDSSLKNSEKQSRLNKMLGLKPSDKQKKAITNLISGNKINFADLYDNPDLKDAEKNSISFSKDDFDALSDDLASILGDSFELLLKAKAVYNCSVLSKVIGDEQYLSFAKVKIYEKHKTDLTKLKNVIKKHFPKDYKKVFGYNKNEKNNNNYSGYVGVCKTKSKKLIINNSVNQEDFYKFLKTILSAKSEIKEVNDILTEIETGTFLPKQISKSNAEIPYQLRKMELEKILSNAEKHFSFLKQKDEKGLSHSEKIIMLLTFKIPYYIGPINDNHKKSFPDRCWVVKKEKSPSGKTTPWNFFDHIDKEKTAEEFITSRTNFCTYLIGESVLPKNSLLYSEYTVLNEINNLQIIIDGKNICDTKLKQKIYEELFKKYKKITQKQISTFIKHEGICNKTDEVIILGIDKECTSSLKSYIELKNIFGKQVDEISTKNMLEEIIRWATIYDEGEGKTILKTKIKAEYGKYCSDEQIKKILNLKFSGWGRLSRKFLETVTSEMPGFSEPVNIITAMRETQNNLMELLSSEFKFTENIKKINSGFEDVEKQFSYDGLVKPLFLSPSVKKMLWQTLKLVKEISHITQAPPKKIFIEMAKGAELDPVRTKTRLKILQDLYNNCKNDADAFSSEIKDLSGKIENEDNLRLRSDKLYLYYTQLGKCMYCGKPIEIGHVFDTSNYDIDHIYPQSKIKDDSISNRVLVCSSCNKNKEDKYPLKAEIQSKQRGFWNFLQRNNFISLEKFNRLTRATPISDDETAKFIARQLVETRQATKVAARVLEKMFPETKIVYSKAETVSMFRNKFDIVKCREINDFHHAHDAYLNIVVGNVYNTKFTNNLWNFIKEKRDNPKIADTYNYYKVFDYDVKRNNITAWEKGKTIITVKDMLKRNTPIYTRQAACKKGGLFDQTIMKKGLGQHPLKKEGPFSNISKYGGYNKVSAAYYTLIEYEEKGNKIRSLETIPLYLVKDIQKDQDVLKSYLTDLLGKKEFKILVPKIKINSLLKINGFPCHITGKTNDSFLLRPAVQFCCSNDEVLYFKKIIRFSEIRSQREKIGKTISPYEDLSFRSYIKENLCKKTKNDEIGEKEFYDLLQKKNLEIYDMLLTKHKDTIYKKRPNSATIDILVKGKEKFKSLIIENQFEVILEILKLFSATRNVSDLQHIGGSKYSGVAKIGNKISSLDNCILIYQSITGIFEKRIDLLKV

SEQ ID NO: 1332 - protein, 357 aa, Treponema denticola
MKKEIKDYFLGLDVGTGSVGWAVTDTDYKLLKANRKDLWGMRCFETAETAEVRRLHRGARRRIERRKKRIKLLQELFSQEIAKTDEGFFQRMKESPFYAEDKTILQENALFNDRDFTDKTYHKAYPTINHLIKAWIENKVKPDPRLLYLACHNIIKKRGHFLFEGDFDSENQFDTSIQAFFEYLREDMEVDIDADSQKIKEILKDSSLKNSEKQSRLNKILGLKSSDKQKKAITNLISGNKINFADLYDNPDLKDAEKNSISFSKDDFDALSDDLASILGDSFELLLKAKAVYNCSVLSKVIGDEQYLSFAKVKIYEKHKTDLTKLKNVIKKHFPKDYKKVFGYNKNEKITTITPDM

SEQ ID NO: 1333 - protein, 1395 aa, Treponema denticola
MKKEIKDYFLGLDVGTGSVGWAVTDTDYKLLKANRKDLWGMRCFETAETAEVRRLHRGARRRIERRKKRIKLLQELFSQEIAKTDEGFFQRMKESPFYAEDKTILQENALFNDRDFTDKTYHKAYPTINHLIKAWIENKVKPDPRLLYLACHNIIKKRGHFLFEGDFDSENQFDTSIQALFEYLREDMEVDIDADSQKVKEILKDSSLKNSEKQSRLNKMLGLKPSDKQKKAITNLISGNKINFADLYDNPDLKDAEKNSISFSKDDFDALSDDLASILGDSFELLLKAKAVYNCSVLSKVIGDEQYLSFAKVKIYEKHKTDLTKLKNVIKKHFPNDYKKVFGYNKNEKNNNNYSAYVGVCKTKSKKLVINNTVNQEDFYKFLKPILLAKSEIKEVNDILTEIETGTFLPKQISKSNAEIPYQLRKMELEKILSNAEKHFSFLKQKDEKGLSHSEKIIMLLTFKIPYYIGPINDNHKKSFPDRCWVIKKEKSPSGKTTPWNFFDHIDKDKTAEAFITSRTNFCTYLVGESVLPKNSLLYSEYTVLNEINNLQIIIDGKNICDIKLKQKIYEELFKKYKKITQKQISTFIKHEGICNKTDEVIILGIDKECTSSLKSYIELKNIFGKQVDEISTKNMLEEIIRWATIYDEGEGKTILKTKIKAEYGKYCSDEQIKKILNLKFSGWGRLSRKFLETVTSEMPGFSEPVNIITAMRETQNNLMELLSSEFKFTENIKKINSGFEDVEKQFSYDSLVKPLFLSPSVKKMLWQTLKLVKEISHITQAPPKKIFIEMAKGAELDPVRTKTRLKILQDLYNNCKNDADAFSSEIKDLSGKIENEDNLRLRSDKLYLYYTQLGKCMYCGKPIEIGHVFDTSNYDIDHIYPQSKIKDDSISNRVLVCSSCNKNKEDKYPLKAEIQSKQRGFWNFLQRNNFISLEKLNRLTRTSPISDDETAKFIARQLVETRQATKVAAKVLEKMFPETKIVYSKAETVSMFRNKFDIIKCREINDFHHAHDAYLNIVVGNVYNTKFTNNPWNFIKEKRDNPKIADTYNYYKVFDYDVKRNNITAWEKGKTIITVKDMLKRNTPIYTRQAACKKGELFNQTIMKKGLGQHPLKKEGPLSNISKYGGYNKVSAAYYTLIEYEEKGSKIRSLETIPLYLVKDIQKNKDGLKSYLTDQIGKKEIKILIPKIKINSLLKINGFPCHITGKMGEAFVLRPAVQFCCSNDEALYFKKIIRFNEIRKQREKMGKTISPYEDLSFRSYIKDNLCKKTKADEIEEKEFYDLLQKKNLEIYDMLLTKHKDTIYKKRPNSATIDILVKGKEKFKSLIIENQFEVILEILKLFSATRNVSDLQHIGGSKNAGNARVGNKISSLDNCILIYQSITGIFEKRIDLLKI

SEQ ID NO: 1334 - protein, 631 aa, Treponema denticola
MLWQTLKLVKEISHITQAPPKKIFIEMAKGAELEPARTKTRLKILQDLYNNCKNDADAFSSEIKDLSGKIENEDNLRLRSDKLYLYYTQLGKCMYCGKPIEIGHVFDTSNYDIDHIYPQSKIKDDSISNRVLVCSSCNKNKEDKYPLRSEIQSKQRGFWNFLQRNNFISLEKLNRLTRTTPISDDETAKFIARQLVETRQATKVAAKVLEKMFPETKIVYSKAETVSMFRNKFDIVKCREINDFHHAHDAYLNIVVGNIYNTKFTNNPWNFIKEKRDNPKIADTYNYYKVFDYDVKRNNITAWEKGKTIITVKDMLKRNTPIYTRQAACKKGGLFDQTIMKKGLGQHPLKKEGPFSNISKYGGYNKVSAAYYTLIEYEEKENKIRSLETIPLYLVKDIQKSQEKLKSYLTDLLGKKEIKILVPKIKINSLLKINGFPCHITGKTNDSFLLRPAVQFCCSNDEVLYFKKIIRFNEIRSQREKMGKTISPYEDLSFRSYIKENLCKKTKNDEIGEKEFYDLLQKKNLEIYDMLLTKHKDTIYNKRPNSTTLGMLTKGRYEFINLKPKDQIIVMLEILKLFCTTREAIDLGLIKGKPAAGVATLGKKISNLDNCILIYQSITGIFEKRIDLLKV

SEQ ID NO: 1335 - protein, 631 aa, Treponema denticola
MLWQTLKLVKEISHITQAPPKKIFIEMAKGAELEPARTKTRLKILQDLYSSCKNDADAFSSEIQYLSGKIENEDNLRLRSDKLYLYYTQLGKCMYCGKPIEIGHVFDTSNYDIDHIYPQSKIKDDSISNRVLVCSSCNKNKEDKYPLKSEIQSKQRGFWNFLQRNNFISLEKLNRLTRTTPISDDETAKFIARQLVETRQATKVAAKVLEKMFPETKIVYSKAETVSMFRNKFDIIKCREINDFHHAHDAYLNIVVGNVYNTKFTNNPWNFIKEKRDNPKIADTYNYYKVFDYDVKRNNITAWEKGKTIITVKDMLKRNTPIYTRQAACKKGELFNQTIMKKGLGQHPLKKEGPFSNISKYGGYNKVSAAYYTLIEYEEKVNKIRSLETIPLYLVKDIQKDQDVLKSYLTDLLGKKEIKILVPKIKINSLLKINGFPCHITGKTGDSFVLRPAVQFCCSNDEVLYFKKIIRFNEIRSQREKMGKTISPYEDLSFRSYIKENLCKKTKADEIGEKEFYDLLQKKNLEIYDMLLTKHKDTIYNKRPNSTTLGMLTKGRYEFINLKPKDQIIVMLEILKLFCTTREAIDLGLIKGKPAAGVATLGKKISNLDNCILIYQSITGIFEKRIDLLKV

SEQ ID NO: 1336 - protein, 370 aa, Treponema denticola
MTEIETGTFLPKQISKSNAEIPYQLRKMELEKILSNAEKHFSFLKQKDEKGLSHSEKIIMLLTFKIPYYIGPINDNHKKSFPDRCWVVKKEKSPSGKTTPWNFFDHIDKEKTAEEFITSRTNFCTYLVGESVLPKSSLLYSEYTVLNEINNLQIIIDGKNICDIKLKQKIYEELFKKYKKITQKQISTFIKHEGICNKTDEVIILGIDKECTSSLKSYIELKNIFGKQVDEISTKNMLEDIIRWAAIYDEGEGKTILKTKIKAEYGKYCSDEQIKKILNLKFSGWGRLSRKFLETVTSEMPGFSEPVNIITAMRETQNNLMELLSSEFKFTENIKKINSGFEDVEKQFSYDGLVKPLFLSPSVKKCCGRL

SEQ ID NO: 1337 - protein, 591 aa, Treponema phagedenis
MARGKEAEKGRTSSRYASIKALYENCKQDLADYDAVLEQFKSEEPLRLRSDKLYLYYTQLGRCMYTGRVIDIDRLMSDNSAYDIDHIYPRSKIKDDSLTNRVLVVKDANQDKRDEPLSPQIQDKQKGFWDFLKHNNFISIEKYERLTYRGYFTEEMLSGFIARQLVETRQGTKTAGQILEQLYPDSTVVYCKAANTSEFRQKFNLIKCREINDLHHAHDAYLNIAVGNVYYTKFTSNPRNFMKLKEPYNLRELFDRDVERNNTIAWVKNKTITTIKDMLKRNTPLYTRYAYCKTGGFFDQNIMKKGKGQFPLKENSPLSDISKYGGYNKVSGAYFILVQKKEKDAVVRILETVPLYLLNKPGKESENVREYLSTALGTKDFKILIPKIKINSLFKINGFLVHITGKTNDRFLVRSAVQFFCDDNLTLFFKRIIAFNGLRNLNKDKSMTAYDDNTMRVYVRGNLFKDKNQLFDKNKFNEIVKGKNISVYKDMVKRYETSIYKFRPNTAVIPILKSGEDKFINLPIEEQFKILQEILKLFGAINGTANLTLIGGRPSTGEMKISNNISNLKQCILIHQSPTGVFEQQIDLLKI

SEQ ID NO: 1338 - protein, 1062 aa, Treponema sp.
MIMKLEKWRLGLDLGTNSIGWSVFSLDKDNSVQDLIDMGVRIFSDGRDPKTKEPLAVARRTARSQRKLIYRRKLRRKQVFKFLQEQGLFPKTKEECMTLKSLNPYELRIKALDEKLEPYELGRALFNLAVRRGFKSNRKDGSREEVSEKKSPDEIKTQADMQTHLEKAIKENGCRTITEFLYKNQGENGGIRFAPGRMTYYPTRKMYEEEFNLIRSKQEKYYPQVDWDDIYKAIFYQRPLKPQQRGYCIYENDKERTFKAMPCSQKLRILQDIGNLAYYEGGSKKRVELNDNQDKVLYELLNSKDKVTFDQMRKALCLADSNSFNLEENRDFLIGNPTAVKMRSKNRFGKLWDEIPLEEQDLIIETIITADEDDAVYEVIKKYDLTQEQRDFIVKNTILQSGTSMLCKEVSEKLVKRLEEIADLKYHEAVESLGYKFADQTVEKYDLLPYYGKVLPGSTMEIDLSAPETNPEKHYGKISNPTVHVALNQTRVVVNALIKEYGKPSQIAIELSRDLKNNVEKKAEIARKQNQRAKENIAINDTISALYHTAFPGKSFYPNRNDRMKYRLWSELGLGNKCIYCGKGISGAELFTKEIEIEHILPFSRTLLDAESNLTVAHSSCNAFKAERSPFEAFGTNPSGYSWQEIIQRANQLKNTSKKNKFSPNAMDSFEKDSSFIARQLSDNQYIAKAALRYLKCLVENPSDVWTTNGSMTKLLRDKWEMDSILCRKFTEKEVALLGLKPEQIGNYKKNRFDHRHHAIDAVVIGLTDRSMVQKLATKNSHKGNRIEIPEFPILRSDLIEKVKNIVVSFKPDHGAEGKLSKETLLGKIKLHGKETFVCRENIVSLSEKNLDDIVDEKIKSKVKDYVAKHKGQKIEAVLSDFSKENGIKKVRCVNRVQTPIEITSGKISRYLSPEDYFAAVIWEIPGEKKTFKAQYIRRNEVEKNSKGLNVVKPAVLENGKPHPAAKQVCLLHKDDYLEFSDKGKMYFCRIAGYAATNNKLDIRPVYAVSYCADWINSTNETMLTGYWKPTPTQNWVSVNVLFDKQKARLVTVSPIGRVFRK

SEQ ID NO: 1339 - protein, 281 aa, Treponema vincentii
MKTLGLDIGTNSIGWGIVDETANKIEDCGVYIFPEGVKKEKGNESSKAAERTSFRLARRLKFRRKLRKCETLKVLIKNKMCPLTMEELEKWRKQKIYPVSQDFLNWYRTDELKNWEPYFLRKKCAEQKAGPYEIGRALYHLAQRRGFLSNRKESTKASDGKVSKSIDELSSLMDGRTLGQYFYELKQSGEKVRGKYTSRKEHYEKEFNKICEVQEISPELKDDLYRAIFFQRKLKSQKFLVGKCTFERNKPRAPISHFEFEEFRMLSFINSIKIAKKLRRR

SEQ ID NO: 1340 - protein, 675 aa, uncultured bacterium
MTAENYSNVRFAFDIGTNSIGWAVFQLNDKQEATSILNAGARIFSDGRDPKTFEPLAVRRRNVRSASRMRDRYLRRRKRTLDKLIGYGLLPEDKAERDKILLETNDKPSGSTDKKTDPYSLRARALEEKLPLAYVARALFHIGQRRGFKSNRKADRKSNEKGKIAAGIEELSGLMHQSHAPTLGAYLAKRREEGHVVRLRASSEALTNKAYAFYPERAMLEDEFHKIWQAQAEYYPDVLTKEREEELFHVMFFQRPLKEQKVGLCTLVEGELRLPKSDPLFQQFRLYKEINELAIILPDLSQRKLTMEERDTLITLMRPAKTKTFAALRKALKIPAGGRFNKETENRKQLTGDEVYSVFSKPELFGGDWAKFSIEQQREIIDQLNNEENPDKLEEWLKNKFPKLSDEQRSEIINANLPDGYGRFGITATSKILEQLKKDVISEAEAAHRCGFDHSLANRNWKGLDELPRYQEVLERHIVPGTGDKNDIYDIYKGRLTNPTVHIGLNQVRRLTNRLIKAYGKPWQIVVELARDLPMSSEERKEHNKTLNDNIKAGFERTQKLERLGQKDNANNRLLLKLWEELGKDPDDRKSIYSGTRITEPMLFSGEVEIDHILPFSLTYDDSYANKILCLREENRIKRNRAPADVTEWKDRYDEIIGRSKNCQRTNKNVLGPMQ

SEQ ID NO: 1341 - protein, 1017 aa, uncultured bacterium]
MRVDSLGRCLSDEEWARVIYHLCKHRGFHWISRAEAKQTEGDSKSEGGKVKQGLAGTAKLMDEKGYRSAAEMVLAEFPEAQRNKQGEYRKALSRELLAKELALLFARQRVFGNRHATDTLETAILGNSDKKSGLFWQQKPALAGADLLKMLGTCTFEKNEYRAPKASFTAERHVWLTRLNNLRIVTDGITRQLTEQERQLVLPLPYRQAGDLTYKQLGMALTKAGLLEAGCFKFIGLAYPTEAQKAEGKTKDPESATLVKIPAWQELRQTLNKASLNDEWEKLSGDALCGQPEIFDKIAWILSVYKDDDEVRTELAKLVLPNPEGLTEALLNIRFDKFHALSLKALRAIVPHMEKGLRYDEACVQAGYHHSQLHKIGEGEHKYLPPLYDGRDGDGRMIFAEDADIPRNPVVLRSLNQARKVVNAIIRRYGSPSAVHIEMARDLSRPFDERNKIKKDQDEYQARNQRDREQFIELFGHPPKGLEFEKWRLYREQNGQCAYSQKPLASSGDVAEIFLDGSTEIDHALPYSRSFDDSKNNKVLVLTRENRDKGNRTPYEYLGGAENSERWQRFFSFVESNKAYRLAKRTRLLRKDFGAKESEEFRERNLNDTRYVCRFFKNYVEQHLKLAEGSEAKRCVVVSGQLTNFLRTRWGLLKIRSDSDRHHALDAAVVAACSHSMVQRLSNYSRTRELEQVRDGFVNIETGEIVNPAMHQQLREHFPDPWPYFRHELEARLKIDSPALLREEMARLSSYTEEELAALKPLFVSRAPQRRNGGAAHKDTIYGQPEKLKKNGSVSQKVALASLALKDIDLLADPHRNAKLYGAIRERLEAHGGKGDKAFPATNPLRKPDKEGNPTGPIVRTVTKVIDKLSGIPVRGGIAKNDTMLRVDVFTKAGRFHLVPVYVHHRVTGLPNQAITRGKDENQWAIIDDTFEWRFSLYPNDLVQIRLKDETHLGYYASTDRSTSSISIWAHDRNQSVGKDGLIRSIGVTTAKDIEKFHVDTLGNVYPAPPEKRRGLA

SEQ ID NO: 1342 - protein, 600 aa, uncultured bacterium]
VNAIIKKHGSLSAVHIEMARDLSRPLDERREVKKLQEEFKDRNDKARESFEADHGYRPKGIVFEKWMLYREQHGKCAYSMEGLDIDRVLNDANYAQIDHALPYSRSYDDSKNNKVLVLTRENQNKGNRTAYEYLTSFAGGEDGDRWRNYAAWVNSNKSYRMAKRNRLLRKNYGPDEASGFKDRNLNDTRYICKFFKNYVEEHLQLAPRADGNANKRCVVVNGQLTAFLRARWGLSKVRSESDRHHALDAAVVAACSHGMVKALADYARNKEVAYLREGFPDPETGEIINPEAHARGVHHFPEPWAHFRHELQVRLYSDDLQALREDLQRLGTYSEQDLLGVRTLFVSRAPQRRNDGAVHKETIYAQPEALRKQGGVVQKVPLTSLSLKDLDNLADPHRNAKLYTALRARLEAHGGKADKAFGPDQPFYKPDKNGNPTGPIVRTIKLVIDKLSGIPIRGGVAKNDTMLRVDVFTKAGKFHLVPVYVHHRVTGLPDRAIVAFKDEVEWTQVDDSFKFLFSIHPNDLIRIGLKAKEPMIGYFASCHRGTGAFNVWSHDRNTSVGKSGSVEGIGIKTALSLEKLNIDVLGNVYPARPEQRHGLA

SEQ ID NO: 1343 - protein, 1011 aa, uncultured delta
MSSKAIDSLEQLDLFKPQEYTLGLDLGIKSIGWAILSGERIANAGVYLFETAEELNSTGNKLISKAAERGRKRRIRRMLDRKARRGRHIRYLLEREGLPTDELEEVVVHQSNRTLWDVRAEAVERKLTKQELAAVLFHLVRHRGYFPNTKKLPPDDESDSADEEQGKINRATSRLREELKASDCKTIGQFLAQNRDRQRNREGDYSNLMARKLVFEEALQILAFQRKQGHELSKDFEKTYLDVLMGQRSGRSPKLGNCSLIPSELRAPSSAPSTEWFKFLQNLGNLQISNAYREEWSIDAPRRAQIIDACSQRSTSSYWQIRRDFQIPDEYRFNLVNYERRDPDVDLQEYLQQQERKTLANFRNWKQLEKIIGTGHPIQTLDEAARLITLIKDDEKLSDQLADLLPEASDKAITQLCELDFTTAAKISLEAMYRILPHMNQGMGFFDACQQESLPEIGVPPAGDRVPPFDEMYNPVVNRVLSQSRKLINAVIDEYGMPAKIRVELARDLGKGRELRERIKLDQLDKSKQNDQRAEDFRAEFQQAPRGDQSLRYRLWKEQNCTCPYSGRMIPVNSVLSEDTQIDHILPISQSFDNSLSNKVLCFTEENAQKSNRTPFEYLDAADFQRLEAISGNWPEAKRNKLLHKSFGKVAEEWKSRALNDTRYLTSALADHLRHHLPDSKIQTVNGRITGYLRKQWGLEKDRDKHTHHAVDAIVVACTTPAIVQQVTLYHQDIRRYKKLGEKRPTPWPETFRQDVLDVEEEIFITRQPKKVSGGIQTKDTLRKHRSKPDRQRVALTKVKLADLERLVEKDASNRNLYEHLKQCLEESGDQPTKAFKAPFYMPSGPEAKQRPILSKVTLLREKPEPPKQLTELSGGRRYDSMAQGRLDIYRYKPGGKRKDEYRVVLQRMIDLMRGEENVHVFQKGVPYDQGPEIEQNYTFLFSLYFDDLVEFQRSADSEVIRGYYRTFNIANGQLKISTYLEGRQDFDFFGANRLAHFAKVQVNLLGKVIK

SEQ ID NO: 1344 - protein, 1011 aa, uncultured delta proteobacterium HF0070_07E19; identical to SEQ ID NO: 1343

SEQ ID NO: 1345 - protein, 1120 aa, Veillonella sp.
MGFKANLVNLFTDEDIEVILPEEKEFKSINLHEGIYEDVRDAYEDAWGDRFAIVDQCKVLHDIIVISSIIKPGQSLSEAKIESYNQHKEDLVLLKSVLKEDRKLYDDMFVVDTDKGTNYVKYTKQGVNGNTSATQEEFYKYVRKVVSVLPETEHTRRIVQKLEEGTFLPLQRISKNGVVPYQLHKEELVRILDKATVNFPFLNKVENGLTVADKIISILEFKIPYYVGPLNPTHSIENGGFAWVVRKEAGQVLPWNFEQKVDVQASAVKFIENLTNKCTYLIDQDVLPKYSLLYAEFSLLNELNNIRVNDKPLPADVKQAFIRDHFISLQDSKTATKKVVAKYLVDNNYVSQPPIITGMDQQIATKLTSHRDMTRILGEHFDHAMAEDIIRYITIFGESKDMLRQVLKNYYGDRLTTEQIKKLGKLTYTGWGRLSKKFLSDIWGMKKNDDDAEAGTIIEHMREGQENLMQLLSSSYSFIDVVQEYVTNVLGEKEKTAFEMLEDLSLSPMVKRSVWQTLRILDEIVSIRKELPKKIFVEVARTNKADKKRTQSRKALLEELYKQIKDEDVHVLQQELESKEDSALNSKKLYLYFTQMGRCMYSGRRIDIHELFTDKYDIDHIYPRSLTKDDSWHNIVLVEKQLNAEKTDRFPILSAIQSKQKGFWKLLWDRGFISEKKYDRLVRTTDLTDEELNQFINRQMVSTNQSVKAVTTLLHQLYPETEVVFSKAENVSDFRHDYDFVKVRSINHHHHAKDAYLNIVVGNVYHEKFTKNFLSFAKQKGTRRTYNLTKIFEYEIKLTEESKKVIWDPNIHMDIVKKMMKSNDVRVTQRAVPQKGGLSDETIYKKGIAKRGVYLPLKSSDERVRDVEKYGGRTSITISEYIILNIRDTSDQDRIEIFSLPLYIAGKKDIHKAIEEAYLSTCKKPASVVDIQILYRGLYIGSKVNINGFTYYMGGKTGSNVSIDSAVDVVMDITSSVYIKLLEKVAIKKIENPKTFRIENIKTSYNHKEVTVSKEQNIALYQELLKKLDTPLFSKMKGNKLEEFRTVGFDTFIALSLEEQASVLLEVLNVLTNFKTKRDITKIGMTSSRSTLGINISNTEQFSVITTSITGLYEQEIKIK

SEQ ID NO: 1346 - protein, 983 aa, Verminephrobacter aporrectodeae
MRRRRDRLLKRKARMHDQLMRHGFFPADAAGRKVLERLNPYQLRAKGLHQALTPGEFARALFHINQRRGFQSNRKTDRKDNESGALKQAISELRAQIHDSGCATVGEWFWKERMQQKPEGVHRQGVRARYRETPYTTDEGRQRIDKRYDLYVDRAMIEQEFDALWAVQAALQPGLFTDAACKELRYTLLFQRKLRPVKPGRCTLLPEEERAPLALPSTQRFRILQEVNHLRLLDEALREVPLTLAQRDALVAALESQGKLGFAPMRKLLKLPGTVKFNLEDEKRTELKGNATSAILARKDLFGPAWAGFDAALQDEIVWQLVSEEGEGRLIAWLQQHTGVDEARAEAIADTSLPEGYGSLSRKALERIVPALQREVCSYDKAVQAAGFAHHSDLGFDFEHSGDEVQQVGERIIASTGEVRPLFAFKQLPYYGKALQRHVAFGSGKPEDPEEKRHGKIANPTVHIGLNQVRTVVNALIRRYGRPSEVVVELARDLKQSREQQQETQRKQAENQRRNTRIRERIAETLGISPERVRSSDIQKWILWEELSFDVVDRRCPYSGEQISTTMLLSPKVEIEHILPFSQTLDDSLNNRTVALREANRIKRNRTPWDARADFEARGWSYEGILHRAERMPLRKRYRFAPDGYQRWLGEDKDFLARALNDTRYLSRVAANYLRLVCPKPQGVRVIPGRMTAMLRAKFGLNDVLGLDGEKNRNDHRHHAVDACVIGVTDQGLMQRFARASAQAREDGLTRLVQDMPLPWPSYRDHVERAVRHIWVSHKPDHGFEGAMMEETAYGIRKDGSIKPRRKADGSAGREVVNLIRITESRQPVRHGVDSQGQPLPYKGYVGGSNYCIEITANDQGKWEGAVISTFEAYRIVRASGWGRLRHCSHGQNGRPLMMRLMIGDAVRLALDGSEKTMRVVKISANGQVFLVAPNEANVDARNRDKADPFAYVSKKAGSFQSAKARQVSISPIGELRDPGFKG

SEQ ID NO: 1347 - RNA, 94 nt, artificial  sequence
  Synthetic sequence
guuuucccuuuucaaagaaaucuccugggcaccuaucuucuuaggugcccucccuuguuuaaaccugaccaguuaaccggcugguuagguuuuu

SEQ ID NO: 1348 - RNA, 22 nt, artificial  sequence
  Synthetic sequence
gagauuuaugaaaagggaaaac

SEQ ID NO: 1349 - RNA, 36 nt, artificial  sequence
  Synthetic sequence
uaaucccacagccgccaguuccgcuggcggcauuuu

SEQ ID NO: 1350 - DNA, 10 bp, artificial  sequence
  Synthetic sequence
aagccaaaaa

SEQ ID NO: 1351 - DNA, 15 bp, artificial  sequence
  Synthetic sequence
tcttcattgcgctta

SEQ ID NO: 1352 - RNA, 73 nt, artificial  sequence
  Synthetic sequence
aacagcauagcaaguuaaaauaaggcuaguccguuaucaacuugaaaaguggcaccgagucggugcuuuuuuu

SEQ ID NO: 1353 - DNA, 20 bp, artificial  sequence
  Synthetic sequence
gcagcagaagaagcctttgt

SEQ ID NO: 1354 - DNA, 20 bp, artificial  sequence
  Synthetic sequence
ttcctcctctccctcctctc

SEQ ID NO: 1355 - RNA, 125 nt, artificial  sequence
  Synthetic sequence
  misc_feature (13)..(112): n is a, c, g, or u
guuuuagagcuannnnnnnnnnnnnnnnnnnnnnnnnnnnnnnnnnnnnnnnnnnnnnnnnnnnnnnnnnnnnnnnnnnnnnnnnnnnnnnnnnnnnnnnnnnnnnnnnnnnuagcaaguuaaaa

SEQ ID NO: 1356 - RNA, 123 nt, artificial  sequence
  Synthetic sequence
  misc_feature (12)..(111): n is a, c, g, or u
guuuagagcugnnnnnnnnnnnnnnnnnnnnnnnnnnnnnnnnnnnnnnnnnnnnnnnnnnnnnnnnnnnnnnnnnnnnnnnnnnnnnnnnnnnnnnnnnnnnnnnnnnnncagcaaguuaaa

SEQ ID NO: 1357 - RNA, 124 nt, artificial  sequence
  Synthetic sequence
  misc_feature (13)..(112): n is a, c, g, or u
guuuuagagcugnnnnnnnnnnnnnnnnnnnnnnnnnnnnnnnnnnnnnnnnnnnnnnnnnnnnnnnnnnnnnnnnnnnnnnnnnnnnnnnnnnnnnnnnnnnnnnnnnnnncagcgaguuaaa

SEQ ID NO: 1358 - RNA, 128 nt, artificial  sequence
  Synthetic sequence
  misc_feature (14)..(113): n is a, c, g, or u
guuuuuguacucunnnnnnnnnnnnnnnnnnnnnnnnnnnnnnnnnnnnnnnnnnnnnnnnnnnnnnnnnnnnnnnnnnnnnnnnnnnnnnnnnnnnnnnnnnnnnnnnnnnnagaagcuacaaagau

SEQ ID NO: 1359 - RNA, 122 nt, artificial  sequence
  Synthetic sequence
  misc_feature (12)..(111): n is a, c, g, or u
guuguagcuccnnnnnnnnnnnnnnnnnnnnnnnnnnnnnnnnnnnnnnnnnnnnnnnnnnnnnnnnnnnnnnnnnnnnnnnnnnnnnnnnnnnnnnnnnnnnnnnnnnnnguugcuacaau

SEQ ID NO: 1360 - RNA, 42 nt, artificial  sequence
  Synthetic sequence
guuuuagagcuagaaauagcaaguuaaaauaaggcuaguccg

SEQ ID NO: 1361 - RNA, 55 nt, artificial  sequence
  Synthetic sequence
cucaccuuccuacggucacuauucaccuuacgguacacccgacaguuuuaacucg

SEQ ID NO: 1362 - RNA, 55 nt, artificial  sequence
  Synthetic sequence
uugcacgacgccgaccgaccacuugaaggcuaucacgcccacaacuuacuaaagg

SEQ ID NO: 1363 - RNA, 55 nt, artificial  sequence
  Synthetic sequence
aguguuguuacucaccgucuauaucggaccaccaaguccgccgcguaaaaauaac

SEQ ID NO: 1364 - protein, 34 aa, artificial  sequence
  Synthetic sequence
IPYYVGPLARGNSRFAWMTRKSEETITPWNFEEV

SEQ ID NO: 1365 - protein, 34 aa, artificial  sequence
  Synthetic sequence
IPYYVGPLARGNSDFAWSIRKRNEKITPWNFEDV

SEQ ID NO: 1366 - protein, 34 aa, artificial  sequence
  Synthetic sequence
IPYFVGPLANGQSEFAWLTRKADGEIRPWNIEEK

SEQ ID NO: 1367 - protein, 34 aa, artificial  sequence
  Synthetic sequence
IPYYIGPLAREKSDFAWMTRKTDDSIRPWNFEDL

SEQ ID NO: 1368 - protein, 34 aa, artificial  sequence
  Synthetic sequence
IPYYVGPLARGKSDFAWLSRKSADKITPWNFDEI

SEQ ID NO: 1369 - protein, 36 aa, artificial  sequence
  Synthetic sequence
IPYYVGPLAKKQENSPFAWLIRKSEEKIKPWNLPEI

SEQ ID NO: 1370 - protein, 26 aa, artificial  sequence
  Synthetic sequence
RNSDKLIARKKDWDPKKYGGFDSPTV

SEQ ID NO: 1371 - protein, 39 aa, artificial  sequence
  Synthetic sequence
GLFNANLSSKPKPNSNENLVGAKEYLDPKKYGGYAGISN

SEQ ID NO: 1372 - protein, 26 aa, artificial  sequence
  Synthetic sequence
GNSSKLIPRKTNWDPMKYGGLDSPNM

SEQ ID NO: 1373 - protein, 29 aa, artificial  sequence
  Synthetic sequence
GNSDKLIPRKTKDIYLDPKKYGGFDSPIV

SEQ ID NO: 1374 - protein, 29 aa, artificial  sequence
  Synthetic sequence
GNSDKLIPRKTKKFYWDTKKYGGFDSPIV

SEQ ID NO: 1375 - protein, 26 aa, artificial  sequence
  Synthetic sequence
KDSSKLLPRKNNWDPAKYGGLGSPNV

SEQ ID NO: 1376 - protein, 7 aa, artificial  sequence
  Synthetic sequence
SRVAPDP

SEQ ID NO: 1377 - protein, 7 aa, artificial  sequence
  Synthetic sequence
SGDAVQK

SEQ ID NO: 1378 - protein, 7 aa, artificial  sequence
  Synthetic sequence
ALKDFSH

SEQ ID NO: 1379 - protein, 39 aa, artificial  sequence
  Synthetic sequence
FPDRCWVVKKEKSPSGKTTPWNFFDHIDKEKTAEEFITS

SEQ ID NO: 1380 - protein, 32 aa, artificial  sequence
  Synthetic sequence
AWSIRKRNEKITPWNFEDVIDKESSAEAFINR

SEQ ID NO: 1381 - protein, 32 aa, artificial  sequence
  Synthetic sequence
AWLSRKSADKITPWNFDEIVDKESSAEAFINR

SEQ ID NO: 1382 - protein, 32 aa, artificial  sequence
  Synthetic sequence
AWMTRKTDDSIRPWNFEDLVDKEKSAEAFIHR

SEQ ID NO: 1383 - protein, 32 aa, artificial  sequence
  Synthetic sequence
AWMTRKSEETITPWNFEEVVDKGASAQSFIER

SEQ ID NO: 1384 - protein, 33 aa, artificial  sequence
  Synthetic sequence
FSKRKKTDSDRDETPFGAIAVRGGFVEIGPSIH

SEQ ID NO: 1385 - protein, 26 aa, artificial  sequence
  Synthetic sequence
EPFYKYDKAGNRTQQVKAVRVEQVQK

SEQ ID NO: 1386 - protein, 14 aa, artificial  sequence
  Synthetic sequence
SYGGKEGVLKALEL

SEQ ID NO: 1387 - protein, 37 aa, artificial  sequence
  Synthetic sequence
LGQHPLKKEGPFSNISKYGGYNKVSAAYYTLIEYEEK

SEQ ID NO: 1388 - protein, 37 aa, artificial  sequence
  Synthetic sequence
NSNENLVGAKEYLDPKKYGGYAGISNSFTVLVKGTIE

SEQ ID NO: 1389 - protein, 39 aa, artificial  sequence
  Synthetic sequence
NSDKLIPRKTKKFYWDTKKYGGFDSPIVAYSILVIADIE

SEQ ID NO: 1390 - protein, 39 aa, artificial  sequence
  Synthetic sequence
NSDKLIPRKTKDIYLDPKKYGGFDSPIVAYSVLVVADIK

SEQ ID NO: 1391 - protein, 36 aa, artificial  sequence
  Synthetic sequence
NSDKLIARKKDWDPKKYGGFDSPTVAYSVLVVAKVE

SEQ ID NO: 1392 - DNA, 23 bp, artificial  sequence
  Synthetic sequence
ggcgcataaagatgagacgctgg

SEQ ID NO: 1393 - DNA, 23 bp, artificial  sequence
  Synthetic sequence
ccagcgtctcatctttatgcgcc

SEQ ID NO: 1394 - DNA, 23 bp, artificial  sequence
  Synthetic sequence
gtgataagtggaatgccatgtgg

SEQ ID NO: 1395 - DNA, 23 bp, artificial  sequence
  Synthetic sequence
ccacatggcattccacttatcac

SEQ ID NO: 1396 - DNA, 23 bp, artificial  sequence
  Synthetic sequence
ctggtgaacttccgatagtgcgg

SEQ ID NO: 1397 - DNA, 23 bp, artificial  sequence
  Synthetic sequence
ccgcactatcggaagttcaccag

SEQ ID NO: 1398 - DNA, 23 bp, artificial  sequence
  Synthetic sequence
cagatatagcctggtggttcagg

SEQ ID NO: 1399 - DNA, 23 bp, artificial  sequence
  Synthetic sequence
cctgaaccaccaggctatatctg

SEQ ID NO: 1400 - DNA, 23 bp, artificial  sequence
  Synthetic sequence
ggcaatgccgatggcgatagtgg

SEQ ID NO: 1401 - DNA, 23 bp, artificial  sequence
  Synthetic sequence
ccactatcgccatcggcattgcc

SEQ ID NO: 1402 - DNA, 23 bp, artificial  sequence
  Synthetic sequence
ggtgtgaaagaacaccaacaggg

SEQ ID NO: 1403 - DNA, 23 bp, artificial  sequence
  Synthetic sequence
ccctgttggtgttctttcacacc

SEQ ID NO: 1404 - DNA, 17 bp, artificial  sequence
  Synthetic sequence
taatacgactcactata

SEQ ID NO: 1405 - DNA, 59 bp, artificial  sequence
  Synthetic sequence
caaaacagcatagctctaaaacgcgtctcatctttatgcgtctatagtgagtcgtatta

SEQ ID NO: 1406 - RNA, 42 nt, artificial  sequence
  Synthetic sequence
gacgcauaaagaugagacgcguuuuagagcuaugcuguuuug

SEQ ID NO: 1407 - RNA, 42 nt, artificial  sequence
  Synthetic sequence
gugauaaguggaaugccaugguuuuagagcuaugcuguuuug

SEQ ID NO: 1408 - RNA, 42 nt, artificial  sequence
  Synthetic sequence
cuggugaacuuccgauagugguuuuagagcuaugcuguuuug

SEQ ID NO: 1409 - RNA, 36 nt, artificial  sequence
  Synthetic sequence
cagaaagccggggcguuuuagagcuaugcuguuuug

SEQ ID NO: 1410 - DNA, 59 bp, artificial  sequence
  Synthetic sequence
caaaacagcatagctctaaaacctatcgccatcggcattgcctatagtgagtcgtatta

SEQ ID NO: 1411 - RNA, 42 nt, artificial  sequence
  Synthetic sequence
ggcaaugccgauggcgauagguuuuagagcuaugcuguuuug

SEQ ID NO: 1412 - DNA, 59 bp, artificial  sequence
  Synthetic sequence
caaaacagcatagctctaaaactgttggtgttctttcacacctatagtgagtcgtatta

SEQ ID NO: 1413 - RNA, 42 nt, artificial  sequence
  Synthetic sequence
ggugugaaagaacaccaacaguuuuagagcuaugcuguuuug

SEQ ID NO: 1414 - RNA, 42 nt, artificial  sequence; identical to SEQ ID NO: 280
  Synthetic sequence

SEQ ID NO: 1415 - DNA, 90 bp, artificial  sequence
  Synthetic sequence
aaaaagcaccgactcggtgccactttttcaagttgataacggactagccttattttaacttgctatgctgtcctatagtgagtcgtatta

SEQ ID NO: 1416 - RNA, 73 nt, artificial  sequence
  Synthetic sequence
ggacagcauagcaaguuaaaauaaggcuaguccguuaucaacuugaaaaaguggcaccgagucggugcuuuuu

SEQ ID NO: 1417 - DNA, 55 bp, artificial  sequence
  Synthetic sequence
agcagaaatctctgctgacgcataaagatgagacgctggagtacaaacgtcagct

SEQ ID NO: 1418 - DNA, 55 bp, artificial  sequence
  Synthetic sequence
agctgacgtttgtactccagcgtctcatctttatgcgtcagcagagatttctgct

SEQ ID NO: 1419 - DNA, 55 bp, artificial  sequence
  Synthetic sequence
gagtggaaggatgccagtgataagtggaatgccatgtgggctgtcaaaattgagc

SEQ ID NO: 1420 - DNA, 55 bp, artificial  sequence
  Synthetic sequence
gctcaattttgacagcccacatggcattccacttatcactggcatccttccactc

SEQ ID NO: 1421 - DNA, 55 bp, artificial  sequence
  Synthetic sequence
aacgtgctgcggctggctggtgaacttccgatagtgcgggtgttgaatgatttcc

SEQ ID NO: 1422 - DNA, 55 bp, artificial  sequence
  Synthetic sequence
ggaaatcattcaacacccgcactatcggaagttcaccagccagccgcagcacgtt

SEQ ID NO: 1423 - DNA, 55 bp, artificial  sequence
  Synthetic sequence
tcacaacaatgagtggcagatatagcctggtggttcaggcggcgcatttttattg

SEQ ID NO: 1424 - DNA, 55 bp, artificial  sequence
  Synthetic sequence
caataaaaatgcgccgcctgaaccaccaggctatatctgccactcattgttgtga

SEQ ID NO: 1425 - DNA, 55 bp, artificial  sequence
  Synthetic sequence
gaatgaacgatgcagaggcaatgccgatggcgatagtgggtatcatgtagccgct

SEQ ID NO: 1426 - DNA, 55 bp, artificial  sequence
  Synthetic sequence
agcggctacatgatacccactatcgccatcggcattgcctctgcatcgttcattc

SEQ ID NO: 1427 - DNA, 55 bp, artificial  sequence
  Synthetic sequence
aatcgatggtgtctccggtgtgaaagaacaccaacaggggtgttaccactaccgc

SEQ ID NO: 1428 - DNA, 55 bp, artificial  sequence
  Synthetic sequence
gcggtagtggtaacacccctgttggtgttctttcacaccggagacaccatcgatt

SEQ ID NO: 1429 - DNA, 35 bp, artificial  sequence
  Synthetic sequence
aattgaaagtgataagtggaatgccatgtggaaac

SEQ ID NO: 1430 - DNA, 35 bp, artificial  sequence
  Synthetic sequence
gatcgtttccacatggcattccacttatcactttc

SEQ ID NO: 1431 - DNA, 55 bp, artificial  sequence
  Synthetic sequence
agcagaaatctctgctgacgcataaagatgagacgctcgagtacaaacgtcagct

SEQ ID NO: 1432 - DNA, 55 bp, artificial  sequence
  Synthetic sequence
agctgacgtttgtactcgagcgtctcatctttatgcgtcagcagagatttctgct

SEQ ID NO: 1433 - DNA, 55 bp, artificial  sequence
  Synthetic sequence
agctgcataacgcgaaaaaatatatttatctgcttgatcttcaaatgttgtattg

SEQ ID NO: 1434 - DNA, 55 bp, artificial  sequence
  Synthetic sequence
caatacaacatttgaagatcaagcagataaatatattttttcgcgttatgcagct

SEQ ID NO: 1435 - DNA, 55 bp, artificial  sequence
  Synthetic sequence
agcagaaatctctgctctgcgtatttctactctgcgtggagtacaaacgtcagct

SEQ ID NO: 1436 - DNA, 55 bp, artificial  sequence
  Synthetic sequence
agctgacgtttgtactccacgcagagtagaaatacgcagagcagagatttctgct

SEQ ID NO: 1437 - DNA, 55 bp, artificial  sequence
  Synthetic sequence
agctgcataacgcgggaaaatccatttatctgcttgatcttcggatgttccattg

SEQ ID NO: 1438 - DNA, 55 bp, artificial  sequence
  Synthetic sequence
caatggaacatccgaagatcaagcagataaatggattttcccgcgttatgcagct

SEQ ID NO: 1439 - DNA, 55 bp, artificial  sequence
  Synthetic sequence
ggctgcaccacgcgggaaaatccatttaggtgcttcctcttcggatgttccattg

SEQ ID NO: 1440 - DNA, 55 bp, artificial  sequence
  Synthetic sequence
caatggaacatccgaagaggaagcacctaaatggattttcccgcgtggtgcagcc

SEQ ID NO: 1441 - DNA, 55 bp, artificial  sequence
  Synthetic sequence
ggctggaccacgcgggaaaatccacctaggtggttcctcttcggatgttccatcc

SEQ ID NO: 1442 - DNA, 55 bp, artificial  sequence
  Synthetic sequence
ggatggaacatccgaagaggaaccacctaggtggattttcccgcgtggtccagcc

SEQ ID NO: 1443 - DNA, 55 bp, artificial  sequence
  Synthetic sequence
agcagaaatctctgctctgcgtatttctactcacgctggagtacaaacgtcagct

SEQ ID NO: 1444 - DNA, 55 bp, artificial  sequence
  Synthetic sequence
agctgacgtttgtactccagcgtgagtagaaatacgcagagcagagatttctgct

SEQ ID NO: 1445 - DNA, 55 bp, artificial  sequence
  Synthetic sequence
agcagaaatctctgctctgcgtatttcttgagacgctggagtacaaacgtcagct

SEQ ID NO: 1446 - DNA, 55 bp, artificial  sequence
  Synthetic sequence
agctgacgtttgtactccagcgtctcaagaaatacgcagagcagagatttctgct

SEQ ID NO: 1447 - DNA, 55 bp, artificial  sequence
  Synthetic sequence
agcagaaatctctgctctgcgtataagatgagacgctggagtacaaacgtcagct

SEQ ID NO: 1448 - DNA, 55 bp, artificial  sequence
  Synthetic sequence
agctgacgtttgtactccagcgtctcatcttatacgcagagcagagatttctgct

SEQ ID NO: 1449 - DNA, 55 bp, artificial  sequence
  Synthetic sequence
agcagaaatctctgctctgccataaagatgagacgctggagtacaaacgtcagct

SEQ ID NO: 1450 - DNA, 55 bp, artificial  sequence
  Synthetic sequence
agctgacgtttgtactccagcgtctcatctttatggcagagcagagatttctgct

SEQ ID NO: 1451 - DNA, 55 bp, artificial  sequence
  Synthetic sequence
agcagaaatctctgctgacggtataagatgagacgctggagtacaaacgtcagct

SEQ ID NO: 1452 - DNA, 55 bp, artificial  sequence
  Synthetic sequence
agctgacgtttgtactccagcgtctcatcttataccgtcagcagagatttctgct

SEQ ID NO: 1453 - DNA, 55 bp, artificial  sequence
  Synthetic sequence
agcagaaatctctgctgacgcatattcttgagacgctggagtacaaacgtcagct

SEQ ID NO: 1454 - DNA, 55 bp, artificial  sequence
  Synthetic sequence
agctgacgtttgtactccagcgtctcaagaatatgcgtcagcagagatttctgct

SEQ ID NO: 1455 - DNA, 55 bp, artificial  sequence
  Synthetic sequence
agcagaaatctctgctgacgcataaagaactcacgctggagtacaaacgtcagct

SEQ ID NO: 1456 - DNA, 55 bp, artificial  sequence
  Synthetic sequence
agctgacgtttgtactccagcgtgagttctttatgcgtcagcagagatttctgct

SEQ ID NO: 1457 - DNA, 55 bp, artificial  sequence
  Synthetic sequence
agcagaaatctctgctgacgcataaagatgagtgcgtggagtacaaacgtcagct

SEQ ID NO: 1458 - DNA, 55 bp, artificial  sequence
  Synthetic sequence
agctgacgtttgtactccacgcactcatctttatgcgtcagcagagatttctgct

SEQ ID NO: 1459 - DNA, 55 bp, artificial  sequence
  Synthetic sequence
agcagaaatctctgctgacgcataaagatgagaccgtggagtacaaacgtcagct

SEQ ID NO: 1460 - DNA, 55 bp, artificial  sequence
  Synthetic sequence
agctgacgtttgtactccacggtctcatctttatgcgtcagcagagatttctgct

SEQ ID NO: 1461 - DNA, 55 bp, artificial  sequence; identical to SEQ ID NO: 1417
  Synthetic sequence

SEQ ID NO: 1462 - DNA, 55 bp, artificial  sequence; identical to SEQ ID NO: 1418
  Synthetic sequence

SEQ ID NO: 1463 - DNA, 55 bp, artificial  sequence; identical to SEQ ID NO: 1419
  Synthetic sequence

SEQ ID NO: 1464 - DNA, 55 bp, artificial  sequence; identical to SEQ ID NO: 1420
  Synthetic sequence

SEQ ID NO: 1465 - DNA, 55 bp, artificial  sequence; identical to SEQ ID NO: 1420
  Synthetic sequence

SEQ ID NO: 1466 - DNA, 19 bp, artificial  sequence
  Synthetic sequence
tgggctgtcaaaattgagc

SEQ ID NO: 1467 - DNA, 72 bp, artificial  sequence
  Synthetic sequence
ttcgaaagagtggaaggatgccagtgataagtggaatgccatgtgggctgtcaaaattgagcagaccaaaga

SEQ ID NO: 1468 - DNA, 72 bp, artificial  sequence
  Synthetic sequence
tctttggtctgctcaattttgacagcccacatggcattccacttatcactggcatccttccactctttcgaa

SEQ ID NO: 1469 - DNA, 26 bp, artificial  sequence
  Synthetic sequence
gctgtcaaaattgagcagaccaaaga

SEQ ID NO: 1470 - DNA, 29 bp, artificial  sequence
  Synthetic sequence
tgggctgtcaaaattgagcagaccaaaga

SEQ ID NO: 1471 - DNA, 11 bp, artificial  sequence
  Synthetic sequence
tgggctgtcaa

SEQ ID NO: 1472 - RNA, 37 nt, artificial  sequence
  Synthetic sequence
uugacagcccacauggcauuccacuuaucacuggcau

SEQ ID NO: 1473 - DNA, 27 bp, artificial  sequence
  Synthetic sequence
atgaccctaggggctcccccctgcaaa

SEQ ID NO: 1474 - DNA, 25 bp, artificial  sequence
  Synthetic sequence
agaccctaggggctccccccgcaaa

SEQ ID NO: 1475 - DNA, 26 bp, artificial  sequence
  Synthetic sequence
atgacccaggggctcccccctgcaaa

SEQ ID NO: 1476 - DNA, 25 bp, artificial  sequence
  Synthetic sequence
atgacccaggggccccccctgcaaa

SEQ ID NO: 1477 - DNA, 26 bp, artificial  sequence
  Synthetic sequence
atgaccctaggggctccccccgcaaa

SEQ ID NO: 1478 - DNA, 26 bp, artificial  sequence
  Synthetic sequence
atgaccctaggggccccccctgcaaa

SEQ ID NO: 1479 - DNA, 141 bp, artificial  sequence
  Synthetic sequence
taatacgactcactataggtgataagtggaatgccatggttttagagctatgctgttttggaaacaaaacagcatagcaagttaaaataaggctagtccgttatcaacttgaaaaagtggcaccgagtcggtgcttttttt

SEQ ID NO: 1480 - RNA, 124 nt, artificial  sequence
  Synthetic sequence
ggugauaaguggaaugccaugguuuuagagcuaugcuguuuuggaaacaaaacagcauagcaaguuaaaauaaggcuaguccguuaucaacuugaaaaaguggcaccgagucggugcuuuuuuu

SEQ ID NO: 1481 - DNA, 55 bp, artificial  sequence; identical to SEQ ID NO: 1420
  Synthetic sequence

SEQ ID NO: 1482 - DNA, 73 bp, artificial  sequence
  Synthetic sequence
gagtggaaggatgccagtgataagtggaatgccatgtgggctgtcaaaattgagcctatagtgagtcgtatta

SEQ ID NO: 1483 - RNA, 56 nt, artificial  sequence
  Synthetic sequence
ggcucaauuuugacagcccacauggcauuccacuuaucacuggcauccuuccacuc

SEQ ID NO: 1484 - DNA, 73 bp, artificial  sequence
  Synthetic sequence
gctcaattttgacagcccacatggcattccacttatcactggcatccttccactcctatagtgagtcgtatta

SEQ ID NO: 1485 - DNA, 56 bp, artificial  sequence
  Synthetic sequence
ggagtggaaggatgccagtgataagtggaatgccatgtgggctgtcaaaattgagc

SEQ ID NO: 1486 - DNA, 18 bp, artificial  sequence
  Synthetic sequence
gggctgtcaaaattgagc

SEQ ID NO: 1487 - DNA, 19 bp, artificial  sequence
  Synthetic sequence
accgctgtcaaaattgagc

SEQ ID NO: 1488 - RNA, 18 nt, artificial  sequence
  Synthetic sequence
gggcugucaaaauugagc

SEQ ID NO: 1489 - DNA, 10 bp, artificial  sequence
  Synthetic sequence
tgggctgtca

SEQ ID NO: 1490 - DNA, 15 bp, artificial  sequence
  Synthetic sequence
tgggctgtcaaaatt

SEQ ID NO: 1491 - DNA, 72 bp, artificial  sequence
  Synthetic sequence
aacgtgctgcggctggctggtgaacttccgatagtgcgggtgttgaatgatttcctatagtgagtcgtatta

SEQ ID NO: 1492 - RNA, 55 nt, artificial  sequence
  Synthetic sequence
ggaaaucauucaacacccgcacuaucggaaguucaccagccagccgcagcacguu

SEQ ID NO: 1493 - DNA, 74 bp, artificial  sequence
  Synthetic sequence
tcacaacaatgagtggcagatatagcctggtggttcaggcggcgcatttttattgcctatagtgagtcgtatta

SEQ ID NO: 1494 - RNA, 57 nt, artificial  sequence
  Synthetic sequence
ggcaauaaaaaugcgccgccugaaccaccaggcuauaucugccacucauuguuguga

SEQ ID NO: 1495 - DNA, 19 bp, artificial  sequence
  Synthetic sequence
cgggtgttgaatgatttcc

SEQ ID NO: 1496 - DNA, 19 bp, artificial  sequence
  Synthetic sequence
aggcggcgcatttttattg

SEQ ID NO: 1497 - DNA, 21 bp, artificial  sequence
  Synthetic sequence
tgtgggctgtcaaaattgagc

SEQ ID NO: 1498 - DNA, 21 bp, artificial  sequence
  Synthetic sequence
tgcgggtgttgaatgatttcc

SEQ ID NO: 1499 - DNA, 24 bp, artificial  sequence
  Synthetic sequence
ccatgtgggctgtcaaaattgagc

SEQ ID NO: 1500 - DNA, 24 bp, artificial  sequence
  Synthetic sequence
tagtgcgggtgttgaatgatttcc

SEQ ID NO: 1501 - DNA, 27 bp, artificial  sequence
  Synthetic sequence
atgccatgtgggctgtcaaaattgagc

SEQ ID NO: 1502 - DNA, 27 bp, artificial  sequence
  Synthetic sequence
cgatagtgcgggtgttgaatgatttcc

SEQ ID NO: 1503 - DNA, 30 bp, artificial  sequence
  Synthetic sequence
ggaatgccatgtgggctgtcaaaattgagc

SEQ ID NO: 1504 - DNA, 30 bp, artificial  sequence
  Synthetic sequence
ttccgatagtgcgggtgttgaatgatttcc

SEQ ID NO: 1505 - DNA, 33 bp, artificial  sequence
  Synthetic sequence
agtggaatgccatgtgggctgtcaaaattgagc

SEQ ID NO: 1506 - DNA, 33 bp, artificial  sequence
  Synthetic sequence
aacttccgatagtgcgggtgttgaatgatttcc

SEQ ID NO: 1507 - DNA, 36 bp, artificial  sequence
  Synthetic sequence
ataagtggaatgccatgtgggctgtcaaaattgagc

SEQ ID NO: 1508 - DNA, 39 bp, artificial  sequence
  Synthetic sequence
gtgataagtggaatgccatgtgggctgtcaaaattgagc

SEQ ID NO: 1509 - DNA, 39 bp, artificial  sequence
  Synthetic sequence
ctggtgaacttccgatagtgcgggtgttgaatgatttcc

SEQ ID NO: 1510 - DNA, 55 bp, artificial  sequence
  Synthetic sequence
gagtggaaggatgccagtgataagtggaatgccatgaccgctgtcaaaattgagc

SEQ ID NO: 1511 - DNA, 55 bp, artificial  sequence
  Synthetic sequence
gctcaattttgacagcggtcatggcattccacttatcactggcatccttccactc

SEQ ID NO: 1512 - DNA, 73 bp, artificial  sequence
  Synthetic sequence
gagtggaaggatgccagtgataagtggaatgccatgaccgctgtcaaaattgagcctatagtgagtcgtatta

SEQ ID NO: 1513 - RNA, 55 nt, artificial  sequence
  Synthetic sequence
ggcucaauuuugacagcggcauggcauuccacuuaucacuggcauccuuccacuc

SEQ ID NO: 1514 - DNA, 18 bp, artificial  sequence
  Synthetic sequence
gggctgtcaaaattgagc

SEQ ID NO: 1515 - DNA, 19 bp, artificial  sequence
  Synthetic sequence
tgggctgtcaaaattgagc

SEQ ID NO: 1516 - DNA, 18 bp, artificial  sequence
  Synthetic sequence
gggctgtcaaaattgagc

SEQ ID NO: 1517 - DNA, 19 bp, artificial  sequence
  Synthetic sequence
tgggctgtcaaaattgagc

SEQ ID NO: 1518 - DNA, 17 bp, artificial  sequence
  Synthetic sequence
gggcgtcaaaattgagc

SEQ ID NO: 1519 - DNA, 130 bp, artificial  sequence
  Synthetic sequence
taatacgactcactataggggcagagatgatgaccctgtttaagagctatgctggaaacagcatagcaagtttaaataaggctagtccgttatcaacttgaaaaagtggcaccgagtcggtgcttttttt

SEQ ID NO: 1520 - RNA, 113 nt, artificial  sequence
  Synthetic sequence
ggggcagagaugaugacccuguuuaagagcuaugcuggaaacagcauagcaaguuuaaauaaggcuaguccguuaucaacuugaaaaaguggcaccgagucggugcuuuuuuu

SEQ ID NO: 1521 - DNA, 132 bp, artificial  sequence
  Synthetic sequence
taatacgactcactataggccaaagttgtcatggatgacgtttaagagctatgctggaaacagcatagcaagtttaaataaggctagtccgttatcaacttgaaaaagtggcaccgagtcggtgcttttttt

SEQ ID NO: 1522 - RNA, 115 nt, artificial  sequence
  Synthetic sequence
ggccaaaguugucauggaugacguuuaagagcuaugcuggaaacagcauagcaaguuuaaauaaggcuaguccguuaucaacuugaaaaaguggcaccgagucggugcuuuuuuu

SEQ ID NO: 1523 - RNA, 115 nt, artificial  sequence
  Synthetic sequence
ggaugucaucauauuuggcaggguuuaagagcuaugcuggaaacagcauagcaaguuuaaauaaggcuaguccguuaucaacuugaaaaaguggcaccgagucggugcuuuuuuu

SEQ ID NO: 1524 - DNA, 132 bp, artificial  sequence
  Synthetic sequence
taatacgactcactataggatgtcatcatatttggcagggtttaagagctatgctggaaacagcatagcaagtttaaataaggctagtccgttatcaacttgaaaaagtggcaccgagtcggtgcttttttt

SEQ ID NO: 1525 - DNA, 115 bp, artificial  sequence
  Synthetic sequence
ggatgtcatcatatttggcagggtttaagagctatgctggaaacagcatagcaagtttaaataaggctagtccgttatcaacttgaaaaagtggcaccgagtcggtgcttttttt

SEQ ID NO: 1526 - DNA, 27 bp, artificial  sequence
  Synthetic sequence
atgacccttggggctcccccctgcaaa

SEQ ID NO: 1527 - DNA, 27 bp, artificial  sequence
  Synthetic sequence
tggatgaccggggccaggggtgctaag

SEQ ID NO: 1528 - DNA, 27 bp, artificial  sequence
  Synthetic sequence
ttggcaggtggttctagacggcaggtc

SEQ ID NO: 1529 - DNA, 27 bp, artificial  sequence
  Synthetic sequence
ccccagcgtggaaggtggaggagtggg

SEQ ID NO: 1530 - DNA, 26 bp, artificial  sequence
  Synthetic sequence
atgaccctaggggctccccccgcaaa

SEQ ID NO: 1531 - DNA, 21 bp, artificial  sequence
  Synthetic sequence
ctcactgttctctccctccgc

SEQ ID NO: 1532 - DNA, 20 bp, artificial  sequence
  Synthetic sequence
aggggtctacatggcaactg

SEQ ID NO: 1533 - DNA, 20 bp, artificial  sequence
  Synthetic sequence
agaaaatctggcaccacacc

SEQ ID NO: 1534 - DNA, 20 bp, artificial  sequence
  Synthetic sequence
ggagtacttgcgctcaggag

SEQ ID NO: 1535 - RNA, 86 nt, Streptococcus mutans
aaacaacacagcaaguuaaauaaggcagugauuuuuaauccaguccguacacaacuugaaaaagugcgcaccgauucggugcuuuu

SEQ ID NO: 1536 - RNA, 25 nt, Streptococcus mutans
agcaaguuaaaauaaggcuaguccg

SEQ ID NO: 1537 - RNA, 71 nt, Streptococcus thermophilus
aaacaacacagcgaguuaaauaaggcuuaguccguacucaacuugaaaagguggcaccgauucgguguuuu

SEQ ID NO: 1538 - RNA, 26 nt, Streptococcus thermophilus
cagcgaguuaaauaaggcuuaguccg

SEQ ID NO: 1539 - RNA, 82 nt, Streptococcus thermophilus
aaaucuugcagaagcuacaaagauaaggcuucaugccgaaaucaacacccugucauuuuauggcaggguguuuucguuauuu

SEQ ID NO: 1540 - RNA, 29 nt, Streptococcus thermophilus
agaagcuacaaagauaaggcuucaugccg

SEQ ID NO: 1541 - RNA, 95 nt, Neisseria meningitidis
aaaugagaaccguugcuacaauaaggccgucugaaaagaugugccgcaacgcucugccccuuaaagcuucugcuuuaaggggcaucguuuauuuc

SEQ ID NO: 1542 - RNA, 35 nt, Neisseria meningitidis
guugcuacaauaaggccgucugaaaagaugugccg

SEQ ID NO: 1543 - RNA, 89 nt, Pasteurella multocida
aaaugagagaguugcuacaauaaggcuucugaaaagaaugaccguaacgcucugccccuugugauucuuaauugcaaggggcaucguuu

SEQ ID NO: 1544 - RNA, 37 nt, Pasteurella multocida
agaguugcuacaauaaggcuucugaaaagaaugaccg

SEQ ID NO: 1545 - protein, 1367 aa, Streptococcus pyogenes
MDKKYSIGLDIGTNSVGWAVITDDYKVPSKKLKVLGNTDRHGIKKNLIGALLFDSGETAEATRLKRTARRRYTRRKNRICYLQEIFSNEMAKVDDSFFHRLEESFLVEEDKKHERHPIFGNIVDEVAYHEKYPTIYHLRKKLADSTDKVDLRLIYLALAHMIKFRGHFLIEGDLNPDNSDVDKLFIQLVQTYNQLFEENPINASRVDAKAILSARLSKSRRLENLIAQLPGEKKNGLFGNLIALSLGLTPNFKSNFDLAEDAKLQLSKDTYDDDLDNLLAQIGDQYADLFLAAKNLSDAILLSDILRVNSEITKAPLSASMIKRYDEHHQDLTLLKALVRQQLPEKYKEIFFDQSKNGYAGYIDGGASQEEFYKFIKPILEKMDGTEELLAKLNREDLLRKQRTFDNGSIPYQIHLGELHAILRRQEDFYPFLKDNREKIEKILTFRIPYYVGPLARGNSRFAWMTRKSEETITPWNFEEVVDKGASAQSFIERMTNFDKNLPNEKVLPKHSLLYEYFTVYNELTKVKYVTEGMRKPAFLSGEQKKAIVDLLFKTNRKVTVKQLKEDYFKKIECFDSVEISGVEDRFNTSLGTYHDLLKIIKDKDFLDNEENEDILEDIVLTLTLFEDKEMIEERLKKYANLFDDKVMKQLKRRHYTGWGRLSRKLINGIRDKQSGKTILDFLKSDGFANRNFMQLINDDSLTFKEAIQKAQVSGQGHSLHEQIANLAGSPAIKKGILQTVKIVDELVKVMGHKPENIVIEMARENQTTQKGQKNSRERMKRIEEGIKELGSQILKEHPVENTQLQNEKLYLYYLQNGRDMYVDQELDINRLSDYDVDHIVPQSFLKDDSIDNKVLTRSDKNRGKSDNVPSEEVVKKMKNYWRQLLNAKLITQRKFDNLTKAERGGLSELDKAGFIKRQLVETRQITKHVAQILDSRMNTKYDENDKLIREVKVITLKSKLVSDFRKDFQFYKVREINNYHHAHDAYLNAVVGTALIKKYPKLESEFVYGDYKVYDVRKMIAKSEQEIGKATAKYFFYSNIMNFFKTEITLANGEIRKRPLIETNGETGEIVWDKGRDFATVRKVLSMPQVNIVKKTEVQTGGFSKESILPKRNSDKLIARKKDWDPKKYGGFDSPTVAYSVLVVAKVEKGKSKKLKSVKELLGITIMERSSFEKNPIDFLEAKGYKEVRKDLIIKLPKYSLFELENGRKRMLASAGELQKGNELALPSKYVNFLYLASHYEKLKGSPEDNEQKQLFVEQHKHYLDEIIEQISEFSKRVILADANLDKVLSAYNKHRDKPIREQAKNIIHLFTLTNLGAPAAFKYFDTTIERNRYKSIKEVLDATLIHQSITGLYEIRIDLSQLGGD

SEQ ID NO: 1546 - protein, 17 aa, artificial  sequence
  Synthetic sequence
MAPKKKRKVGIHGVPAA

SEQ ID NO: 1547 - protein, 16 aa, artificial  sequence
  Synthetic sequence
KRPAATKKAGQAKKKK

SEQ ID NO: 1548 - protein, 5 aa, artificial  sequence
  Synthetic sequence
GSGGS

SEQ ID NO: 1549 - protein, 4 aa, artificial  sequence
  Synthetic sequence
GGGS

SEQ ID NO: 1550 - protein, 4 aa, artificial  sequence
  Synthetic sequence
GGSG

SEQ ID NO: 1551 - protein, 5 aa, artificial  sequence
  Synthetic sequence
GGSGG

SEQ ID NO: 1552 - protein, 5 aa, artificial  sequence
  Synthetic sequence
GSGSG

SEQ ID NO: 1553 - protein, 5 aa, artificial  sequence
  Synthetic sequence
GSGGG

SEQ ID NO: 1554 - protein, 5 aa, artificial  sequence
  Synthetic sequence
GGGSG

SEQ ID NO: 1555 - protein, 5 aa, artificial  sequence
  Synthetic sequence
GSSSG

SEQ ID NO: 1556 - protein, 47 aa, artificial  sequence
  Synthetic sequence
NDLDAYEREAEKLEKKNEVLRNRLAALENELATLRQEVASMKQELQS

SEQ ID NO: 1557 - protein, 42 aa, artificial  sequence
  Synthetic sequence
NEKEELKSKKAELRNRIEQLKQKREQLKQKIANLRKEIEAYK

SEQ ID NO: 1558 - protein, 41 aa, artificial  sequence
  Synthetic sequence
SIAATLENDLARLENENARLEKDIANLERDLAKLEREEAYF

SEQ ID NO: 1559 - protein, 107 aa, artificial  sequence
  Synthetic sequence
GVQVETISPGDGRTFPKRGQTCVVHYTGMLEDGKKFDSSRDRNKPFKFMLGKQEVIRGWEEGVAQMSVGQRAKLTISPDYAYGATGHPGIIPPHATLVFDVELLKLE

SEQ ID NO: 1560 - protein, 292 aa, artificial  sequence
  Synthetic sequence
LEESVALRIITEGASILRQEKNLLDIDAPVTVCGDIHGQFFDLMKLFEVGGSPANTRYLFLGDYVDRGYFSIECVLYLWALKILYPKTLFLLRGNHECRHLTEYFTFKQECKIKYSERVYDACMDAFDCLPLAALMNQQFLCVHGGLSPEINTLDDIRKLDRFKEPPAYGPMCDILWSDPLEDFGNEKTQEHFTHNTVRGCSYFYSYPAVCEFLQHNNLLSILRAHEAQDAGYRMYRKSQTTGFPSLITIFSAPNYLDVYNNKAAVLKYENNVMNIRQFNCSPHPYWLPNFM

SEQ ID NO: 1561 - protein, 165 aa, artificial  sequence
  Synthetic sequence
MVNPTVFFDIAVDGEPLGRVSFELFADKVPKTAENFRALSTGEKGFGYKGSCFHRIIPGFMCQGGDFTRHNGTGGKSIYGEKFEDENFILKHTGPGILSMANAGPNTNGSQFFICTAKTEWLDGKHVVFGKVKEGMNIVEAMERFGSRNGKTSKKITIADCGQLE

SEQ ID NO: 1562 - protein, 94 aa, artificial  sequence
  Synthetic sequence
VAILWHEMWHEGLEEASRLYFGERNVKGMFEVLEPLHAMMERGPQTLKETSFNQAYGRDLMEAQEWCRKYMKSGNVKDLTQAWDLYYHVFRRIS

SEQ ID NO: 1563 - protein, 804 aa, artificial  sequence
  Synthetic sequence
MSNSYDSSSIKVLKGLDAVRKRPGMYIGDTDDGTGLHHMVFEVVDNAIDEALAGHCKEIIVTIHADNSVSVQDDGRGIPTGIHPEEGVSAAEVIMTVLHAGGKFDDNSYKVSGGLHGVGVSVVNALSQKLELVIQREGKIHRQIYEHGVPQAPLAVTGETEKTGTMVRFWPSLETFTNVTEFEYEILAKRLRELSFLNSGVSIRLRDKRDGKEDHFHYEGGIKAFVEYLNKNKTPIHPNIFYFSTEKDGIGVEVALQWNDGFQENIYCFTNNIPQRDGGTHLAGFRAAMTRTLNAYMDKEGYSKKAKVSATGDDAREGLIAVVSVKVPDPKFSSQTKDKLVSSEVKSAVEQQMNELLAEYLLENPTDAKIVVGKIIDAARAREAARRAREMTRRKGALDLAGLPGKLADCQERDPALSELYLVEGDSAGGSAKQGRNRKNQAILPLKGKILNVEKARFDKMLSSQEVATLITALGCGIGRDEYNPDKLRYHSIIIMTDADVDGSHIRTLLLTFFYRQMPEIVERGHVYIAQPPLYKVKKGKQEQYIKDDEAMDQYQISIALDGATLHTNASAPALAGEALEKLVSEYNATQKMINRMERRYPKAMLKELIYQPTLTEADLSDEQTVTRWVNALVSELNDKEQHGSQWKFDVHTNAEQNLFEPIVRVRTHGVDTDYPLDHEFITGGEYRRICTLGEKLRGLLEEDAFIERGERRQPVASFEQALDWLVKESRRGLSIQRYKGLGEMNPEQLWETTMDPESRRMLRVTVKDAIAADQLFTTLMGDAVEPRRAFIEENALKAANIDI

SEQ ID NO: 1564 - protein, 187 aa, artificial  sequence
  Synthetic sequence
MVGSLNCIVAVSQNMGIGKNGDLPWPPLRNEFRYFQRMTTTSSVEGKQNLVIMGKKTWFSIPEKNRPLKGRINLVLSRELKEPPQGAHFLSRSLDDALKLTEQPELANKVDMVWIVGGSSVYKEAMNHPGHLKLFVTRIMQDFESDTFFPEIDLEKYKLLPEYPGVLSDVQEEKGIKYKFEVYEKND

SEQ ID NO: 1565 - protein, 111 aa, artificial  sequence
  Synthetic sequence
MASRGVQVETISPGDGRTFPKRGQTCVVHYTGMLEDGKKVDSSRDRNKPFKFMLGKQEVIRGWEEGVAQMSVGQRAKLTISPDYAYGATGHPGIIPPHATLVFDVELLKLE

SEQ ID NO: 1566 - protein, 183 aa, artificial  sequence
  Synthetic sequence
MNGDETKKVESEYIKKHHRHELVESQCSSTLVKHIKAPLHLVWSIVRRFDEPQKYKPFISRCVVQGKKLEVGSVREVDLKSGLPATKSTEVLEILDDNEHILGIRIVGGDHRLKNYSSTISLHSETIDGKTGTLAIESFVVDVPEGNTKEETCFFVEALIQCNLNSLADVTERLQAESMEKKI

SEQ ID NO: 1567 - protein, 161 aa, artificial  sequence
  Synthetic sequence
METSQKYHTCGSTLVQTIDAPLSLVWSILRRFDNPQAYKQFVKTCNLSSGDGGEGSVREVTVVSGLPAEFSRERLDELDDESHVMMISIIGGDHRLVNYRSKTMAFVAADTEEKTVVVESYVVDVPEGNSEEETTSFADTIVGFNLKSLAKLSERVAHLKL

SEQ ID NO: 1568 - protein, 159 aa, artificial  sequence
  Synthetic sequence
MKTSQEQHVCGSTVVQTINAPLPLVWSILRRFDNPKTFKHFVKTCKLRSGDGGEGSVREVTVVSDLPASFSLERLDELDDESHVMVISIIGGDHRLVNYQSKTTVFVAAEEEKTVVVESYVVDVPEGNTEEETTLFADTIVGCNLRSLAKLSEKMMELT

SEQ ID NO: 1569 - protein, 164 aa, artificial  sequence
  Synthetic sequence
MESSKQKRCRSSVVETIEAPLPLVWSILRSFDKPQAYQRFVKSCTMRSGGGGGKGGEGKGSVRDVTLVSGFPADFSTERLEELDDESHVMVVSIIGGNHRLVNYKSKTKVVASPEDMAKKTVVVESYVVDVPEGTSEEDTIFFVDNIIRYNLTSLAKLTKKMMK

SEQ ID NO: 1570 - protein, 221 aa, artificial  sequence
  Synthetic sequence
MANSESSSSPVNEEENSQRISTLHHQTMPSDLTQDEFTQLSQSIAEFHTYQLGNGRCSSLLAQRIHAPPETVWSVVRRFDRPQIYKHFIKSCNVSEDFEMRVGCTRDVNVISGLPANTSRERLDLLDDDRRVTGFSITGGEHRLRNYKSVTTVHRFEKEEEEERIWTVVLESYVVDVPEGNSEEDTRLFADTVIRLNLQKLASITEAMNRNNNNNNSSQVR

SEQ ID NO: 1571 - protein, 190 aa, artificial  sequence
  Synthetic sequence
MSSSPAVKGLTDEEQKTLEPVIKTYHQFEPDPTTCTSLITQRIHAPASVVWPLIRRFDNPERYKHFVKRCRLISGDGDVGSVREVTVISGLPASTSTERLEFVDDDHRVLSFRVVGGEHRLKNYKSVTSVNEFLNQDSGKVYTVVLESYTVDIPEGNTEEDTKMFVDTVVKLNLQKLGVAATSAPMHDDE

SEQ ID NO: 1572 - protein, 209 aa, artificial  sequence
  Synthetic sequence
MNLAPIHDPSSSSTTTTSSSTPYGLTKDEFSTLDSIIRTHHTFPRSPNTCTSLIAHRVDAPAHAIWRFVRDFANPNKYKHFIKSCTIRVNGNGIKEIKVGTIREVSVVSGLPASTSVEILEVLDEEKRILSFRVLGGEHRLNNYRSVTSVNEFVVLEKDKKKRVYSVVLESYIVDIPQGNTEEDTRMFVDTVVKSNLQNLAVISTASPT

SEQ ID NO: 1573 - protein, 207 aa, artificial  sequence
  Synthetic sequence
MLAVHRPSSAVSDGDSVQIPMMIASFQKRFPSLSRDSTAARFHTHEVGPNQCCSAVIQEISAPISTVWSVVRRFDNPQAYKHFLKSCSVIGGDGDNVGSLRQVHVVSGLPAASSTERLDILDDERHVISFSVVGGDHRLSNYRSVTTLHPSPISGTVVVESYVVDVPPGNTKEETCDFVDVIVRCNLQSLAKIAENTAAESKKKMSL

SEQ ID NO: 1574 - protein, 203 aa, artificial  sequence
  Synthetic sequence
MRSPVQLQHGSDATNGFHTLQPHDQTDGPIKRVCLTRGMHVPEHVAMHHTHDVGPDQCCSSVVQMIHAPPESVWALVRRFDNPKVYKNFIRQCRIVQGDGLHVGDLREVMVVSGLPAVSSTERLEILDEERHVISFSVVGGDHRLKNYRSVTTLHASDDEGTVVVESYIVDVPPGNTEEETLSFVDTIVRCNLQSLARSTNRQ

SEQ ID NO: 1575 - protein, 215 aa, artificial  sequence
  Synthetic sequence
MPTSIQFQRSSTAAEAANATVRNYPHHHQKQVQKVSLTRGMADVPEHVELSHTHVVGPSQCFSVVVQDVEAPVSTVWSILSRFEHPQAYKHFVKSCHVVIGDGREVGSVREVRVVSGLPAAFSLERLEIMDDDRHVISFSVVGGDHRLMNYKSVTTVHESEEDSDGKKRTRVVESYVVDVPAGNDKEETCSFADTIVRCNLQSLAKLAENTSKFS

SEQ ID NO: 1576 - protein, 211 aa, artificial  sequence
  Synthetic sequence
MEMIGGDDTDTEMYGALVTAQSLRLRHLHHCRENQCTSVLVKYIQAPVHLVWSLVRRFDQPQKYKPFISRCTVNGDPEIGCLREVNVKSGLPATTSTERLEQLDDEEHILGINIIGGDHRLKNYSSILTVHPEMIDGRSGTMVMESFVVDVPQGNTKDDTCYFVESLIKCNLKSLACVSERLAAQDITNSIATFCNASNGYREKNHTETNL

SEQ ID NO: 1577 - protein, 188 aa, artificial  sequence
  Synthetic sequence
MEANGIENLTNPNQEREFIRRHHKHELVDNQCSSTLVKHINAPVHIVWSLVRRFDQPQKYKPFISRCVVKGNMEIGTVREVDVKSGLPATRSTERLELLDDNEHILSIRIVGGDHRLKNYSSIISLHPETIEGRIGTLVIESFVVDVPEGNTKDETCYFVEALIKCNLKSLADISERLAVQDTTESRV

SEQ ID NO: 1578 - protein, 187 aa, artificial  sequence
  Synthetic sequence
MMDGVEGGTAMYGGLETVQYVRTHHQHLCRENQCTSALVKHIKAPLHLVWSLVRRFDQPQKYKPFVSRCTVIGDPEIGSLREVNVKSGLPATTSTERLELLDDEEHILGIKIIGGDHRLKNYSSILTVHPEIIEGRAGTMVIESFVVDVPQGNTKDETCYFVEALIRCNLKSLADVSERLASQDITQ

SEQ ID NO: 1579 - protein, 191 aa, artificial  sequence
  Synthetic sequence
MPSELTPEERSELKNSIAEFHTYQLDPGSCSSLHAQRIHAPPELVWSIVRRFDKPQTYKHFIKSCSVEQNFEMRVGCTRDVIVISGLPANTSTERLDILDDERRVTGFSIIGGEHRLTNYKSVTTVHRFEKENRIWTVVLESYVVDMPEGNSEDDTRMFADTVVKLNLQKLATVAEAMARNSGDGSGSQVT

SEQ ID NO: 1580 - protein, 434 aa, artificial  sequence
  Synthetic sequence
MEEVSPAIAGPFRPFSETQMDFTGIRLGKGYCNNQYSNQDSENGDLMVSLPETSSCSVSGSHGSESRKVLISRINSPNLNMKESAAADIVVVDISAGDEINGSDITSEKKMISRTESRSLFEFKSVPLYGFTSICGRRPEMEDAVSTIPRFLQSSSGSMLDGRFDPQSAAHFFGVYDGHGGSQVANYCRERMHLALAEEIAKEKPMLCDGDTWLEKWKKALFNSFLRVDSEIESVAPETVGSTSVVAVVFPSHIFVANCGDSRAVLCRGKTALPLSVDHKPDREDEAARIEAAGGKVIQWNGARVFGVLAMSRSIGDRYLKPSIIPDPEVTAVKRVKEDDCLILASDGVWDVMTDEEACEMARKRILLWHKKNAVAGDASLLADERRKEGKDPAAMSAAEYLSKLAIQRGSKDNISVVVVDLKPRRKLKSKPLN

SEQ ID NO: 1581 - protein, 423 aa, artificial  sequence
  Synthetic sequence
MDEVSPAVAVPFRPFTDPHAGLRGYCNGESRVTLPESSCSGDGAMKDSSFEINTRQDSLTSSSSAMAGVDISAGDEINGSDEFDPRSMNQSEKKVLSRTESRSLFEFKCVPLYGVTSICGRRPEMEDSVSTIPRFLQVSSSSLLDGRVTNGFNPHLSAHFFGVYDGHGGSQVANYCRERMHLALTEEIVKEKPEFCDGDTWQEKWKKALFNSFMRVDSEIETVAHAPETVGSTSVVAVVFPTHIFVANCGDSRAVLCRGKTPLALSVDHKPDRDDEAARIEAAGGKVIRWNGARVFGVLAMSRSIGDRYLKPSVIPDPEVTSVRRVKEDDCLILASDGLWDVMTNEEVCDLARKRILLWHKKNAMAGEALLPAEKRGEGKDPAAMSAAEYLSKMALQKGSKDNISVVVVDLKGIRKFKSKSLN

SEQ ID NO: 1582 - protein, 612 aa, artificial  sequence
  Synthetic sequence
MKMDKKTIVWFRRDLRIEDNPALAAAAHEGSVFPVFIWCPEEEGQFYPGRASRWWMKQSLAHLSQSLKALGSDLTLIKTHNTISAILDCIRVTGATKVVFNHLYDPVSLVRDHTVKEKLVERGISVQSYNGDLLYEPWEIYCEKGKPFTSFNSYWKKCLDMSIESVMLPPPWRLMPITAAAEAIWACSIEELGLENEAEKPSNALLTRAWSPGWSNADKLLNEFIEKQLIDYAKNSKKVVGNSTSLLSPYLHFGEISVRHVFQCARMKQIIWARDKNSEGEESADLFLRGIGLREYSRYICFNFPFTHEQSLLSHLRFFPWDADVDKFKAWRQGRTGYPLVDAGMRELWATGWMHNRIRVIVSSFAVKFLLLPWKWGMKYFWDTLLDADLECDILGWQYISGSIPDGHELDRLDNPALQGAKYDPEGEYIRQWLPELARLPTEWIHHPWDAPLTVLKASGVELGTNYAKPIVDIDTARELLAKAISRTREAQIMIGAAPDEIVADSFEALGANTIKEPGLCPSVSSNDQQVPSAVRYNGSKRVKPEEEEERDMKKSRGFDERELFSTAESSSSSSVFFVSQSCSLASEGKNLEGIQDSSDQITTSLGKNGCK

SEQ ID NO: 1583 - protein, 335 aa, artificial  sequence
  Synthetic sequence
MNGAIGGDLLLNFPDMSVLERQRAHLKYLNPTFDSPLAGFFADSSMITGGEMDSYLSTAGLNLPMMYGETTVEGDSRLSISPETTLGTGNFKKRKFDTETKDCNEKKKKMTMNRDDLVEEGEEEKSKITEQNNGSTKSIKKMKHKAKKEENNFSNDSSKVTKELEKTDYIHVRARRGQATDSHSIAERVRREKISERMKFLQDLVPGCDKITGKAGMLDEIINYVQSLQRQIEFLSMKLAIVNPRPDFDMDDIFAKEVASTPMTVVPSPEMVLSGYSHEMVHSGYSSEMVNSGYLHVNPMQQVNTSSDPLSCFNNGEAPSMWDSHVQNLYGNLGV

SEQ ID NO: 1584 - protein, 533 aa, artificial  sequence
  Synthetic sequence
MKRDHHHHHHQDKKTMMMNEEDDGNGMDELLAVLGYKVRSSEMADVAQKLEQLEVMMSNVQEDDLSQLATETVHYNPAELYTWLDSMLTDLNPPSSNAEYDLKAIPGDAILNQFAIDSASSSNQGGGGDTYTTNKRLKCSNGVVETTTATAESTRHVVLVDSQENGVRLVHALLACAEAVQKENLTVAEALVKQIGFLAVSQIGAMRKVATYFAEALARRIYRLSPSQSPIDHSLSDTLQMHFYETCPYLKFAHFTANQAILEAFQGKKRVHVIDFSMSQGLQWPALMQALALRPGGPPVFRLTGIGPPAPDNFDYLHEVGCKLAHLAEAIHVEFEYRGFVANTLADLDASMLELRPSEIESVAVNSVFELHKLLGRPGAIDKVLGVVNQIKPEIFTVVEQESNHNSPIFLDRFTESLHYYSTLFDSLEGVPSGQDKVMSEVYLGKQICNVVACDGPDRVERHETLSQWRNRFGSAGFAAAHIGSNAFKQASMLLALFNGGEGYRVEESDGCLMLGWHTRPLIATSAWKLSTN

SEQ ID NO: 1585 - protein, 345 aa, artificial  sequence
  Synthetic sequence
MAASDEVNLIESRTVVPLNTWVLISNFKVAYNILRRPDGTFNRHLAEYLDRKVTANANPVDGVFSFDVLIDRRINLLSRVYRPAYADQEQPPSILDLEKPVDGDIVPVILFFHGGSFAHSSANSAIYDTLCRRLVGLCKCVVVSVNYRRAPENPYPCAYDDGWIALNWVNSRSWLKSKKDSKVHIFLAGDSSGGNIAHNVALRAGESGIDVLGNILLNPMFGGNERTESEKSLDGKYFVTVRDRDWYWKAFLPEGEDREHPACNPFSPRGKSLEGVSFPKSLVVVAGLDLIRDWQLAYAEGLKKAGQEVKLMHLEKATVGFYLLPNNNHFHNVMDEISAFVNAEC

SEQ ID NO: 1586 - protein, 358 aa, artificial  sequence
  Synthetic sequence
MAGGNEVNLNECKRIVPLNTWVLISNFKLAYKVLRRPDGSFNRDLAEFLDRKVPANSFPLDGVFSFDHVDSTTNLLTRIYQPASLLHQTRHGTLELTKPLSTTEIVPVLIFFHGGSFTHSSANSAIYDTFCRRLVTICGVVVVSVDYRRSPEHRYPCAYDDGWNALNWVKSRVWLQSGKDSNVYVYLAGDSSGGNIAHNVAVRATNEGVKVLGNILLHPMFGGQERTQSEKTLDGKYFVTIQDRDWYWRAYLPEGEDRDHPACNPFGPRGQSLKGVNFPKSLVVVAGLDLVQDWQLAYVDGLKKTGLEVNLLYLKQATIGFYFLPNNDHFHCLMEELNKFVHSIEDSQSKSSPVLLTP

SEQ ID NO: 1587 - protein, 344 aa, artificial  sequence
  Synthetic sequence
MAGSEEVNLIESKTVVPLNTWVLISNFKLAYNLLRRPDGTFNRHLAEFLDRKVPANANPVNGVFSFDVIIDRQTNLLSRVYRPADAGTSPSITDLQNPVDGEIVPVIVFFHGGSFAHSSANSAIYDTLCRRLVGLCGAVVVSVNYRRAPENRYPCAYDDGWAVLKWVNSSSWLRSKKDSKVRIFLAGDSSGGNIVHNVAVRAVESRIDVLGNILLNPMFGGTERTESEKRLDGKYFVTVRDRDWYWRAFLPEGEDREHPACSPFGPRSKSLEGLSFPKSLVVVAGLDLIQDWQLKYAEGLKKAGQEVKLLYLEQATIGFYLLPNNNHFHTVMDEIAAFVNAECQ

What is claimed is:

1. A Cas9 heterodimer comprising:
A) a first fusion polypeptide comprising:
a) a first polypeptide comprising:
i) a RuvCI polypeptide;
ii) a RuvCII polypeptide;
iii) an HNH polypeptide;
iv) a RuvCIII polypeptide; and
v) a PAM-interacting polypeptide; and
b) a first fusion partner, where the first fusion partner is a first member of a dimerization pair; and
B) a second fusion polypeptide comprising:
a) an alpha-helical recognition region; and
b) a second fusion partner, where the second fusion partner is a second member of a dimerization pair.

2. The Cas9 heterodimer of claim 1, wherein the RuvCI polypeptide comprises an amino acid sequence having at least 75% amino acid sequence identity to amino acids 1-60 of the Streptococcus pyogenes Cas9 amino acid sequence set forth in SEQ ID NO: 1545 or a corresponding Cas9 amino acid sequence set forth in any of SEQ ID NOs: 1-259 and 795-1346, and has a length of from about 50 amino acids to about 70 amino acids.

3. The Cas9 heterodimer of claim 1, wherein the RuvCII polypeptide comprises an amino acid sequence having at least 75% amino acid sequence identity to amino acids 719-775 of the Streptococcus pyogenes Cas9 amino acid sequence set forth in SEQ ID NO: 1545 or a corresponding Cas9 amino acid sequence set forth in any of SEQ ID NOs: 1-259 and 795-1346, and has a length of from about 40 amino acids to about 70 amino acids.

4. The Cas9 heterodimer of claim 1, wherein the HNH polypeptide comprises an amino acid sequence having at least 75% amino acid sequence identity to amino acids 776 to 909 of the Streptococcus pyogenes Cas9 amino acid sequence set forth in SEQ ID NO: 1545 or a corresponding Cas9 amino acid sequence set forth in any of SEQ ID NOs: 1-259 and 795-1346, and has a length of from about 120 amino acids to about 145 amino acids.

5. The Cas9 heterodimer of claim 1, wherein the RuvCIII polypeptide comprises an amino acid sequence having at least 75% amino acid sequence identity to amino acids 910-1099 of the Streptococcus pyogenes Cas9 amino acid sequence set forth in SEQ ID NO: 1545 or a corresponding Cas9 amino acid sequence set forth in any of SEQ ID NOs: 1-259 and 795-1346, and has a length of from about 170 amino acids to about 210 amino acids.

6. The Cas9 heterodimer of claim 1, wherein the PAM-interacting polypeptide comprises an amino acid sequence having at least 75% amino acid sequence identity to amino acids 1100-1367 of the Streptococcus pyogenes Cas9 amino acid sequence set forth in SEQ ID NO: 1545 or a corresponding Cas9 amino acid sequence set forth in any of SEQ ID NOs: 1-259 and 795-1346, and has a length of from about 250 amino acids to about 280 amino acids.

7. The Cas9 heterodimer of any one of claims 1-6, wherein the first fusion polypeptide comprises one or more heterologous nuclear localization sequences (NLS) that provides for nuclear localization.

8. The Cas9 heterodimer of claim 7, wherein the NLS is at or near the N-terminus of the first fusion polypeptide.

9. The Cas9 heterodimer of claim 7, wherein the NLS is at or near the C-terminus of the first fusion polypeptide.

10. The Cas9 heterodimer of claim 7, wherein the first fusion polypeptide comprises an NLS at or near the N-terminus of the first fusion polypeptide and comprises an NLS at or near the C-terminus of the first fusion polypeptide.

11. The Cas9 heterodimer of any one of claims 1-6, wherein the second fusion polypeptide comprises one or more heterologous nuclear localization sequences (NLS) that provides for nuclear localization.

12. The Cas9 heterodimer of claim 11, wherein the NLS is at or near the N-terminus of the second fusion polypeptide.

13. The Cas9 heterodimer of claim 11, wherein the NLS is at or near the C-terminus of the second fusion polypeptide.

14. The Cas9 heterodimer of claim 11, wherein the second fusion polypeptide comprises an NLS at or near the N-terminus of the first second polypeptide and comprises an NLS at or near the C-terminus of the second fusion polypeptide.

15. The Cas9 heterodimer of any one of claims 1-14, wherein the first fusion partner is at or near the N-terminus of the first polypeptide.

16. The Cas9 heterodimer of any one of claims 1-14, wherein the first fusion partner is at or near the C-terminus of the first polypeptide.

17. The Cas9 heterodimer of any one of claims 1-14, wherein the first fusion partner is located internally to the first polypeptide.

18. The Cas9 heterodimer of claim 17, wherein the first fusion partner is located within the HNH polypeptide.

19. The Cas9 heterodimer of claim 18, wherein the first fusion partner is located between amino acids 860 and 880 of amino acids 776 to 909 of the Streptococcus pyogenes Cas9 amino acid sequence set forth in SEQ ID NO: 1545 or a corresponding Cas9 amino acid sequence set forth in any of SEQ ID NOs: 1-259 and 795-1346.

20. The Cas9 heterodimer of claim 17, wherein the first fusion partner is located within the RuvCIII polypeptide.

21. The Cas9 heterodimer of claim 20, wherein the first fusion partner is located between amino acids 1000 and 1025 of the Streptococcus pyogenes Cas9 amino acid sequence set forth in SEQ ID NO: 1545 or a corresponding Cas9 amino acid sequence set forth in any of SEQ ID NOs: 1-259 and 795-1346.

22. The Cas9 heterodimer of any one of claims 1-21, wherein the second fusion partner is at or near the N-terminus of the second polypeptide.

23. The Cas9 heterodimer of any one of claims 1-21, wherein the second fusion partner is at or near the C-terminus of the second polypeptide.

24. The Cas9 heterodimer of any one of claims 1-21, wherein the second fusion partner is located internally to the second polypeptide.

25. A Cas9 heterodimer comprising:
A) a first fusion polypeptide comprising:
a) a first, circular permuted, polypeptide that comprises:
i) a RuvCI polypeptide;
ii) a RuvCII polypeptide;
iii) an HNH polypeptide;
iv) a RuvCIII polypeptide; and
v) a PAM-interacting polypeptide; and
b) a first fusion partner, where the first fusion partner is a first member of a dimerization pair; and
B) a second fusion polypeptide comprising:
a) a second polypeptide that comprises an alpha-helical recognition region; and
b) a second fusion partner, where the second fusion partner is a second member of the dimerization pair.

26. The Cas9 heterodimer of claim 25, wherein the first, circular permuted, polypeptide comprises, in order from N-terminus to C-terminus:
i) a RuvCII polypeptide;
ii) an HNH polypeptide;
iii) a RuvCIII polypeptide;
iv) a PAM-interacting polypeptide;
v) a RuvCI polypeptide.

27. The Cas9 heterodimer of claim 25, wherein the first, circular permuted, polypeptide comprises, in order from N-terminus to C-terminus:
i) an HNH polypeptide;
ii) a RuvCIII polypeptide;
iii) a PAM-interacting polypeptide;
iv) a RuvCI polypeptide; and
v) a RuvCII polypeptide.

28. The Cas9 heterodimer of claim 25, wherein the first, circular permuted, polypeptide comprises, in order from N-terminus to C-terminus:
i) a RuvCIII polypeptide;
ii) a PAM-interacting polypeptide;
iii) a RuvCI polypeptide;
iv) a RuvCII polypeptide; and
v) an HNH polypeptide.

29. The Cas9 heterodimer of claim 25, wherein the first, circular permuted, polypeptide comprises, in order from N-terminus to C-terminus:
i) a C-terminal portion of a RuvCIII polypeptide;
ii) a PAM-interacting polypeptide;
iii) a RuvCI polypeptide;
iv) a RuvCII polypeptide;
v) an HNH polypeptide; and
vi) an N-terminal portion of a RuvCIII polypeptide.

30. The Cas9 heterodimer of claim 25, wherein the first, circular permuted, polypeptide comprises, in order from N-terminus to C-terminus:
i) a C-terminal portion of an HNH polypeptide;
ii) a RuvCIII polypeptide;
iii) a PAM-interacting polypeptide;
iv) a RuvCI polypeptide;
v) a RuvCII polypeptide; and
v) an N-terminal portion of an HNH polypeptide.

31. The Cas9 heterodimer of any one of claims 26 to 30, wherein the first fusion polypeptide comprises, in order from N-terminus to C-terminus:
a) the first fusion partner; and
b) the first polypeptide.

32. The Cas9 heterodimer of any one of claims 26 to 30, wherein the first fusion polypeptide comprises, in order from N-terminus to C-terminus:
a) the first polypeptide; and
b) the first fusion partner.

33. The Cas9 heterodimer of any one of claims 26 to 30, wherein the first fusion polypeptide comprises, in order from N-terminus to C-terminus:
a) heterologous nuclear localization sequences (NLS) that provides for nuclear localization;
b) the first fusion partner; and
c) the first polypeptide.

34. The Cas9 heterodimer of any one of claims 26 to 30, wherein the first fusion polypeptide comprises, in order from N-terminus to C-terminus:
a) an NLS;
b) the first fusion partner;
c) the first polypeptide; and
d) an NLS.

35. The Cas9 heterodimer of any one of claims 1-34, wherein the first fusion polypeptide and the second fusion polypeptide form a heterodimer in the presence of a small molecule dimerizer.

36. The Cas9 heterodimer of any one of claims 1-35, wherein:
a) the first fusion partner is FK506 binding protein 1A (FKBP1A); and the second fusion partner is FKBP1A;
b) the first fusion partner is FKBP1A; and the second fusion partner is and PPP3CA (protein phosphatase 3, catalytic subunit, alpha isozyme);
c) the first fusion partner is FKBP1A; and the second fusion partner is and cyclophilin;
d) the first fusion partner is FKBP1A; and the second fusion partner is and Fkbp-Rapamycin Binding Domain (FRB);
e) the first fusion partner is gyrase B (GyrB); and the second fusion partner is and GyrB;
f) the first fusion partner is dihydrofolate reductase (DHFR); and the second fusion partner is and DHFR;
g) the first fusion partner is DmrB; and the second fusion partner is and DmrB;
h) the first fusion partner is PYL; and the second fusion partner is and ABI;
i) the first fusion partner is Cry2; and the second fusion partner is and CIP; or
j) the first fusion partner is GAI; and the second fusion partner is and GID1.

37. The Cas9 heterodimer of any one of claims 1-35, wherein:
a) the second fusion partner is (FK506 binding protein 1A) FKBP1A; and the first fusion partner is FKBP1A;
b) the second fusion partner is FKBP1A; and the first fusion partner is and PPP3CA (protein phosphatase 3, catalytic subunit, alpha isozyme);
c) the second fusion partner is FKBP1A; and the first fusion partner is and cyclophilin;
d) the second fusion partner is FKBP1A; and the first fusion partner is and Fkbp-Rapamycin Binding Domain (FRB);
e) the second fusion partner is gyrase B (GyrB); and the first fusion partner is and GyrB;
f) the second fusion partner is dihydrofolate reductase (DHFR); and the first fusion partner is and DHFR;
g) the second fusion partner is DmrB; and the first fusion partner is and DmrB;
h) the second fusion partner is PYL; and the first fusion partner is and ABI;
i) the second fusion partner is Cry2; and the first fusion partner is and CIP; or
j) the second fusion partner is GAI; and the first fusion partner is and GID1.

38. A system comprising:
a) a Cas9 heterodimer of any one of claims 1-37; and
b) a Cas9 guide RNA that comprises stem loop 1 but does not comprise at least one of: a stem loop 2 and a stem loop 3.

39. The system of claim 38, wherein the Cas9 guide RNA does not comprise a stem loop 2 and does not comprise a stem loop 3.

40. The system of claim 38 or 39, comprising a small molecule dimerizer that induces dimerization of the first fusion polypeptide and the second fusion polypeptide.

41. One or more nucleic acids comprising nucleotide sequences encoding the Cas9 heterodimer of any one of claims 1-37.

42. The one or more nucleic acids of claim 41, wherein the nucleotide sequences encoding the first fusion polypeptide and the nucleotide sequences encoding the second fusion polypeptide are in the same nucleic acid.

43. The one or more nucleic acids of claim 41, wherein nucleotide sequences encoding the first fusion polypeptide and nucleotide sequences encoding the second fusion polypeptide are in separate nucleic acids.

44. The one or more nucleic acids of claim 41, wherein the nucleotide sequences encoding the first fusion polypeptide are operably linked to a transcription control sequence.

45. The one or more nucleic acids of claim 41, wherein the nucleotide sequences encoding the second fusion polypeptide are operably linked to a transcription control sequence.

46. A recombinant vector comprising the one or more nucleic acids of any one of claims 41-45.

47. The recombinant vector of claim 46, wherein the vector is a viral vector.

48. The recombinant vector of claim 47, wherein the viral vector is an adeno-associated viral vector, a lentiviral vector, or a retroviral vector.

49. A host cell genetically modified with the one or more nucleic acids of any one of claims 41-45, or with the recombinant expression vector of any one of claims 46-48.

50. The host cell of claim 49, wherein the host cell is a prokaryotic cell.

51. The host cell of claim 49, wherein the host cell is a eukaryotic cell.

52. The host cell of claim 51, wherein the host cell is a mammalian cell, a plant cell, an amphibian cell, a reptile cell, a yeast cell, a protozoan cell, or a helminth cell.

53. A method of binding a target nucleic acid, the method comprising:
contacting the target nucleic acid with the system of claim 38.

54. The method of claim 53, wherein the method results in modification of the target nucleic acid.

55. The method of claim 54, wherein said modification is cleavage.

56. The method of any of claims 53 to 55, wherein the Cas9 guide RNA does not comprise a stem loop 2 and does not comprise a stem loop 3.

57. The method of any of claims 53 to 56, wherein the system comprises a small molecule dimerizer that induces dimerization of the first fusion polypeptide and the second fusion polypeptide.

58. The method of any of claims 53 to 57, wherein the system comprises a donor polynucleotide.

59. The method of any of claims 53 to 58, wherein the system comprises a PAMmer.

60. The method of any of claims 53 to 59, wherein the Cas9 heterodimer has reduced nuclease activity.

61. The method of any of claims 53 to 60, wherein the Cas9 heterodimer has nickase activity.

62. The method of any of claims 53 to 61, wherein the Cas9 heterodimer includes a fusion partner that provides for an activity selected from: transcription modulation, methyltransferase activity, demethylase activity, acetyltransferase activity, deacetylase activity, kinase activity, phosphatase activity, ubiquitin ligase activity, deubiquitinating activity, adenylation activity, deadenylation activity, SUMOylating activity, deSUMOylating activity, ribosylation activity, deribosylation activity, myristoylation activity, and demyristoylation activity.
